(19) United States
(12) Patent Application Publication
(10) Pub. No.: US 2015/0376586 A1
(43) Pub. Date: Dec. 31, 2015

(54) RNA Modification to Engineer Cas9 Activity

(71) Applicant: Caribou Biosciences, Inc., Berkeley, CA (US)

(72) Inventors: Andrew Paul May, San Francisco, CA (US); Paul Donohoue, Berkeley, CA (US); Christopher Nye, San Jose, CA (US); Euan Slorach, Oakland, CA (US); Rachel Haurwitz, Kensington, CA (US)

(21) Appl. No.: 14/791,195

(22) Filed: Jul. 2, 2015

Related U.S. Application Data
(63) Continuation of application No. PCT/US2015/037546, filed on Jun. 24, 2015.
(60) Provisional application No. 62/017,113, filed on Jun. 25, 2014.
(60) Provisional application No. 62/065,515, filed on Oct. 17, 2014.
(60) Provisional application No. 62/088,277, filed on Dec. 5, 2014.

(51) Int. Cl. C12N 9/22; A61K 35/12; C12N 15/113

(52) U.S. Cl. CPC C12N 9/22; C12N 15/113; A61K 35/12; C12N 2310/122; C12N 2310/531; C12Y 301/00

(57) ABSTRACT

The disclosure provides for compositions, methods and kits, for reducing off-target effects of genome engineering.

### CROSS-REFERENCE

[0001] This application is a continuation application of International Application No. PCT/US2015/037546, filed Jun. 24, 2015 [Attorney Docket No. 44287-756.601], which application claims the benefit of U.S. Provisional Application No. 62/017,113, filed Jun. 25, 2014 [Attorney Docket No. 44287-756.101], U.S. Provisional Application No. 62/065,515, filed Oct. 17, 2014 [Attorney Docket No. 44287-756.102], and U.S. Provisional Application No. 62/088,277, filed Dec. 5, 2014 [Attorney Docket No. 44287-756.103], each of which is incorporated herein by reference in its entirety.

### BACKGROUND

[0002] Non-natural nucleic acid-targeting nucleic acids can be used in a ribonucleoprotein complex with a site-directed polypeptide, for example, Cas9, to guide the site-directed polypeptide to sequences of interest in a target nucleic acid, for example, DNA. The site-directed polypeptide can target and cut other sequences with similarity to the intended target sequence. There is a need for identifying and engineering nucleic acid-targeting nucleic acids with high specificity for their intended target nucleic acid.

### SUMMARY OF THE INVENTION

[0003] In one aspect, a composition is provided comprising an engineered nucleoprotein complex. In some cases, the engineered nucleoprotein complex comprises a Cas9 polypeptide and a non-natural nucleic acid-targeting nucleic acid, wherein the non-natural nucleic acid-targeting nucleic acid comprises an engineered region selected from the group consisting of: an engineered stem loop duplex structure, an engineered bulge region, an engineered hairpin located 3′ of the stem loop duplex structure, and any combination thereof. In some cases, the engineered nucleoprotein complex results in a modification of a target region of a genomic DNA. In some cases, the engineered nucleoprotein complex has a decreased ability to modify a DNA molecule in a region that is not the target region as compared to a control nucleoprotein complex. In some cases, the control nucleoprotein complex comprises a control nucleic acid-targeting nucleic acid that does not comprise an engineered stem loop duplex structure, an engineered bulge region, and an engineered hairpin located 3′ of the stem loop duplex structure.

[0004] In another aspect, a composition is provided comprising a cell modified with the engineered nucleoprotein complex described above. In some cases, the cell comprises a eukaryotic cell. In some cases, the cell comprises a stem cell. In some cases, the non-natural nucleic acid-targeting nucleic acid comprises RNA nucleobases. In some cases, the non-natural nucleic acid-targeting nucleic acid is RNA. In some cases, the non-natural nucleic acid-targeting nucleic acid comprises non-natural nucleobases. In some cases, the non-natural nucleic acid-targeting nucleic acid further comprises a covalently linked moiety. In some cases, the non-natural nucleic acid-targeting nucleic acid comprises one or more mutations in the engineered region selected from the group consisting of: an engineered stem loop duplex structure, an engineered bulge region, an engineered hairpin located 3′ of the stem loop duplex structure, and any combination thereof. In some cases, the one or more mutation comprises an insertion of one or more nucleotides. In some cases, the one or more mutation comprises a deletion of one or more nucleotides. In some cases, the one or more mutation comprises a substitution of one or more nucleotides with a non-natural nucleotide. In some cases, the non-natural nucleic acid-targeting nucleic acid comprises two or more mutations and a first mutation is separated by at least one nucleobase from a second mutation. In some cases, the non-natural nucleic acid-targeting nucleic acid comprises two or more mutations and a first mutation is adjacent to a second mutation. In some cases, the engineered nucleoprotein complex has about a 10% decreased ability to modify the DNA in a region that is not the target region as compared to the control nucleoprotein complex. In some cases, the engineered region is an engineered stem loop duplex structure. In some cases, the engineered region is an engineered bulge region. In some cases, the engineered region is an engineered hairpin located 3′ of the stem loop duplex structure. In some cases, the composition further comprises a spacer region located 5′ of the stem loop duplex structure. In some cases, the spacer region comprises between 18 to 21 nucleotides in length, inclusive. In some cases, the modification of the target region of the genomic DNA comprises cleavage of a phosphodiester bond.

[0005] In another aspect, a kit is provided comprising the composition described above and a suitable buffer. In some cases, the kit further comprises instructions for use.

[0006] In another aspect, a pharmaceutical composition is provided comprising the cell modified with the engineered nucleoprotein complex described above. In some cases, the pharmaceutical composition further comprises an excipient.

[0007] In another aspect, a composition is provided comprising a genomic DNA, wherein the genomic DNA comprises a target region, a Cas9 polypeptide, and a non-natural nucleic acid-targeting nucleic acid comprising a spacer extension. In some cases, the non-natural nucleic acid-targeting nucleic acid has a decreased ability to modify the genomic DNA in regions that are not the target region as compared to a control nucleic acid-targeting nucleic acid. In some cases, the control nucleic acid-targeting nucleic acid does not comprise a spacer extension.

[0008] In another aspect, a composition is provided comprising a cell modified with the composition described above. In some cases, the cell comprises a eukaryotic cell. In some cases, the cell comprises a stem cell. In some cases, the non-natural nucleic acid-targeting nucleic acid comprises RNA nucleobases. In some cases, the non-natural nucleic acid-targeting nucleic acid is RNA. In some cases, the non-natural nucleic acid-targeting nucleic acid comprises non-natural nucleobases. In some cases, the non-natural nucleic acid-targeting nucleic acid further comprises a covalently linked moiety. In some cases, the non-natural nucleic acid-targeting nucleic acid comprises two or more mutations and a first mutation is separated by at least one nucleobase from a second mutation. In some cases, the non-natural nucleic acid-targeting nucleic acid comprises two or more mutations and a first mutation is adjacent to a second mutation. In some cases, the engineered nucleoprotein complex has about a 10% decreased ability to modify the DNA in a region that is not the target region as compared to the control nucleoprotein complex. In some cases, the composition further comprises a spacer region located 5′ of a stem loop duplex structure in the non-natural nucleic acid-targeting nucleic acid. In some cases, the spacer region comprises between 18 to 21 nucleotides in length, inclusive. In some cases, the modification of the target region of the genomic DNA comprises cleavage of a phosphodiester bond. In some cases, the spacer extension comprises a G. In some cases, the spacer extension comprises an A. In some cases, the spacer extension comprises an U. In some cases, the spacer extension comprises a C. In some cases, the spacer extension comprises one or more 5′ nucleotides. In some cases, the one additional 5′ nucleotide is a G. In some cases, the spacer extension is located 5′ to the spacer region. In some cases, a combined length of the spacer extension and the spacer region is between 20 to 22 nucleotides in length, inclusive.

[0009] In another aspect, a kit is provided comprising the composition described above and a suitable buffer. In some cases, the kit further comprises instructions for use.

In another aspect, a pharmaceutical composition is provided comprising the cell modified with the composition described above. In some cases, the pharmaceutical composition comprises an excipient.

[0010] In one aspect the disclosure provides for a composition comprising: a non-natural CRISPR RNA 5′ spacer extension of a nucleic acid-targeting nucleic acid, wherein the 5′ spacer extension comprises one or more additional 5′ nucleotides. In some embodiments, one of the one or more additional 5′ nucleotides is a guanine. In some embodiments, one of the one or more additional 5′ nucleotides is an adenine. In some embodiments, one of the one or more additional 5′ nucleotides is a cytosine. In some embodiments, one of the one or more additional 5′ nucleotides is a uracil. In some embodiments, the 5′ spacer extension comprises one additional 5′ nucleotide. In some embodiments, the one additional nucleotide is a guanine. In some embodiments, the one additional nucleotide is an adenine. In some embodiments, the one additional nucleotide is a cytosine. In some embodiments, the one additional nucleotide is a uracil. In some embodiments, a spacer region of the nucleic acid-targeting nucleic acid is 21 nucleotides in length. In some embodiments, a spacer region of the nucleic acid-targeting nucleic acid is 20 nucleotides in length. In some embodiments, a spacer region of the nucleic acid-targeting nucleic acid is 19 nucleotides in length. In some embodiments, a spacer region of the nucleic acid-targeting nucleic acid is from 19 to 21 nucleotides in length. In some embodiments, the length of both a spacer region of the nucleic acid-targeting nucleic acid and the 5′ spacer extension is 22 nucleotides in length. In some embodiments, the length of both a spacer region of the nucleic acid-targeting nucleic acid and the 5′ spacer extension is 21 nucleotides in length. In some embodiments, the length of both a spacer region of the nucleic acid-targeting nucleic acid and the 5′ spacer extension is 20 nucleotides in length. In some embodiments, the nucleic acid-targeting nucleic acid is adapted to reduce off-target binding by at least 10% compared to a nucleic acid-targeting nucleic acid lacking the one or more additional 5′ nucleotides. In some embodiments, the nucleic acid-targeting nucleic acid is adapted to reduce off-target binding by at least 20% compared to a nucleic acid-targeting nucleic acid lacking the one or more additional 5′ nucleotides. In some embodiments, the nucleic acid-targeting nucleic acid is adapted to reduce off-target binding by at least 30% compared to a nucleic acid-targeting nucleic acid lacking the one or more additional 5′ nucleotides. In some embodiments, the nucleic acid-targeting nucleic acid is adapted to reduce off-target cleavage by at least 10% compared to a nucleic acid-targeting nucleic acid lacking the one or more additional 5′ nucleotides. In some embodiments, the nucleic acid-targeting nucleic acid is adapted to reduce off-target cleavage by at least 20% compared to a nucleic acid-targeting nucleic acid lacking the one or more additional 5′ nucleotides. In some embodiments, the nucleic acid-targeting nucleic acid is adapted to reduce off-target cleavage by at least 30% compared to a nucleic acid-targeting nucleic acid lacking the one or more additional 5′ nucleotides.

[0011] In one aspect, the disclosure provides for a method for reducing binding of a nucleic acid-targeting nucleic acid to an off-target nucleic acid comprising: contacting a complex comprising a site-directed polypeptide and a modified non-natural nucleic acid-targeting nucleic acid to a target nucleic acid, wherein the complex contacts the target nucleic acid at least 10% more than the off-target nucleic acid. In some embodiments, the complex contacts the target nucleic acid at least 20% more than the off-target nucleic acid. In some embodiments, the complex contacts the target nucleic acid at least 30% more than the off-target nucleic acid. In some embodiments, the contacting comprises hybridizing the nucleic acid-targeting nucleic acid to the target nucleic acid. In some embodiments, the hybridizing comprises hybridizing a portion of the nucleic acid-targeting nucleic acid to the target nucleic acid. In some embodiments, the portion of the nucleic acid-targeting nucleic acid comprises a spacer. In some embodiments, the portion of the nucleic acid-targeting nucleic acid comprises a spacer and one or more 5′ additional nucleotides. In some embodiments, the method further comprises modifying the target nucleic acid. In some embodiments, modifying comprises modifying the target nucleic acid at least 10% more than the off-target nucleic acid. In some embodiments, modifying comprises modifying the target nucleic acid at least 20% more than the off-target nucleic acid. In some embodiments, the modifying comprises modifying the target nucleic acid at least 30% more than the off-target nucleic acid. In some embodiments, the modifying comprises cleaving the target nucleic acid. In some embodiments, the modifying comprises deleting nucleotides from the target nucleic acid. In some embodiments, the modifying comprises inserting a donor polynucleotide in the target nucleic acid. In some embodiments, the modifying comprises increasing transcription of the target nucleic acid. In some embodiments, the modifying comprises decreasing transcription of the target nucleic acid.

[0012] In one aspect, the disclosure provides for a kit comprising: a composition comprising: a non-natural CRISPR RNA 5′ spacer extension of a nucleic acid-targeting nucleic acid, wherein the 5′ spacer extension comprises one or more additional 5′ nucleotides; and a buffer. In some embodiments, the kit further comprises instructions for use.

[0013] In one aspect the disclosure provides for a composition comprising: a non-natural CRISPR RNA spacer of a nucleic acid-targeting nucleic acid, wherein the spacer comprises one or more 5′ nucleotide deletions. In some embodiments, one of the one or more 5′ nucleotide deletions is a guanine. In some embodiments, one of the one or more 5′ nucleotide deletions is an adenine. In some embodiments, one of the one or more 5′ nucleotide deletions is a cytosine. In some embodiments, one of the one or more 5′ nucleotide deletions is a uracil. In some embodiments, the spacer comprises one 5′ nucleotide deletion. In some embodiments, the one 5′ nucleotide deletion is a guanine. In some embodiments, the one 5′ nucleotide deletion is an adenine. In some embodiments, the one 5′ nucleotide deletion is a cytosine. In some embodiments, the one 5′ nucleotide deletion is a uracil. In some embodiments, the spacer region of the nucleic acid-targeting nucleic acid is 20 nucleotides in length. In some embodiments, the spacer region of the nucleic acid-targeting nucleic acid is 19 nucleotides in length. In some embodiments, the spacer region of the nucleic acid-targeting nucleic acid is 18 nucleotides in length. In some embodiments, a spacer region of the nucleic acid-targeting nucleic acid is from 18 to 21 nucleotides in length. In some embodiments, the nucleic acid-targeting nucleic acid is adapted to reduce off-target binding by at least 10% compared to a nucleic acid-targeting nucleic acid lacking the one or more 5′ nucleotide deletions. In some embodiments, the nucleic acid-targeting nucleic acid is adapted to reduce off-target binding by at least 20% compared to a nucleic acid-targeting nucleic acid lacking the one or more 5′ nucleotide deletions. In some embodiments, the nucleic acid-targeting nucleic acid is adapted to reduce off-target binding by at least 30% compared to a nucleic acid-targeting nucleic acid lacking the one or more 5′ nucleotide deletions. In some embodiments, the nucleic acid-targeting nucleic acid is adapted to reduce off-target cleavage by at least 10% compared to a nucleic acid-targeting nucleic acid lacking the one or more 5′ nucleotide deletions. In some embodiments, the nucleic acid-targeting nucleic acid is adapted to reduce off-target cleavage by at least 20% compared to a nucleic acid-targeting nucleic acid lacking the one or more 5′ nucleotide deletions. In some embodiments, the nucleic acid-targeting nucleic acid is adapted to reduce off-target cleavage by at least 30% compared to a nucleic acid-targeting nucleic acid lacking the one or more 5′ nucleotide deletions.

[0014] In one aspect the disclosure provides for a method for reducing binding of a nucleic acid-targeting nucleic acid to an off-target nucleic acid comprising: contacting a complex comprising a site-directed polypeptide and a nucleic acid-targeting nucleic acid comprising a non-natural CRISPR RNA spacer, wherein the spacer comprises one or more 5′ nucleotide deletions, to a target nucleic acid, wherein the complex contacts the target nucleic acid at least 10% more than the off-target nucleic acid. In some embodiments, the complex contacts the target nucleic acid at least 20% more than the off-target nucleic acid. In some embodiments, the complex contacts the target nucleic acid at least 30% more than the off-target nucleic acid. In some embodiments, the contacting comprises hybridizing the nucleic acid-targeting nucleic acid to the target nucleic acid. In some embodiments, the hybridizing comprises hybridizing a portion of the nucleic acid-targeting nucleic acid to the target nucleic acid. In some embodiments, the portion of the nucleic acid-targeting nucleic acid comprises a spacer. In some embodiments, the portion of the nucleic acid-targeting nucleic acid comprises a spacer and one or more 5′ additional nucleotides. In some embodiments, the method further comprises modifying the target nucleic acid. In some embodiments, modifying comprises modifying the target nucleic acid at least 20% more than the off-target nucleic acid. In some embodiments, the modifying comprises modifying the target nucleic acid at least 30% more than the off-target nucleic acid. In some embodiments, the modifying comprises cleaving the target nucleic acid. In some embodiments, the modifying comprises deleting nucleotides from the target nucleic acid. In some embodiments, the modifying comprises inserting a donor polynucleotide in the target nucleic acid. In some embodiments, the modifying comprises increasing transcription of the target nucleic acid. In some embodiments, the modifying comprises decreasing transcription of the target nucleic acid.

[0015] In one aspect, the disclosure provides for a composition comprising: a nucleic acid-targeting nucleic acid, wherein the nucleic acid-targeting nucleic acid comprises a non-natural CRISPR RNA spacer region and a nexus region, wherein the nexus region comprises a hairpin 3′ of a stem-loop duplex structure, wherein a first strand of the stem-loop duplex comprises at least 50% identity to a CRISPR RNA over 6 contiguous nucleotides, and a second strand of the duplex comprises at least 50% identity to a tracrRNA over 6 contiguous nucleotides. In some embodiments, the hairpin in the nexus region comprises the natural number of base-paired nucleotides in the duplex of the hairpin. In some embodiments, the nexus region is a non-natural nexus region. In some embodiments, the hairpin comprises a dinucleotide duplex. In some embodiments, the hairpin comprises a trinucleotide duplex. In some embodiments, the nexus is located immediately 3′ to the stem-loop duplex. In some embodiments, the nexus is located from 1 to 5 nucleotides 3′ of the stem-loop duplex. In some embodiments, the nucleic acid-targeting nucleic acid comprises a single-stranded region 3′ of the hairpin of the nexus. In some embodiments, the single-stranded region comprises from 1-10 nucleotides. In some embodiments, the single-stranded region comprises from 2 to 6 nucleotides. In some embodiments, the single-stranded region comprises at least 50% of the length of the natural single-stranded region. In some embodiments, the single-stranded region comprises at least 60% of the length of the natural single-stranded region. In some embodiments, the single-stranded region comprises at least 70% of the length of the natural single-stranded region. In some embodiments, the single-stranded region comprises at least 80% of the length of the natural single-stranded region. In some embodiments, the single-stranded region comprises the natural single-stranded region of the nucleic acid-targeting nucleic acid. In some embodiments, the single-stranded region comprises a non-natural single stranded region. In some embodiments, the composition further comprises one or more hairpins 3′ of the single-stranded region.

[0016] In yet another aspect, the disclosure provides for a composition comprising: a nucleic acid-targeting nucleic acid, wherein the nucleic acid-targeting nucleic acid comprises a non-natural CRISPR RNA spacer region and a nexus region, wherein the nexus region comprises a hairpin 3′ of a stem-loop duplex structure, wherein the stem-loop duplex structure comprises a sequence that adopts a tertiary structure that can be bound by a Cas9 polypeptide. In some embodiments, the hairpin in the nexus region comprises the natural number of base-paired nucleotides in the duplex of the hairpin. In some embodiments, the nexus region is a non-natural nexus region. In some embodiments, the hairpin comprises a dinucleotide duplex. In some embodiments, the hairpin comprises a trinucleotide duplex. In some embodiments, the nexus is located immediately 3′ to the stem-loop duplex. In some embodiments, the nexus is located from 1 to 5 nucleotides 3′ of the stem-loop duplex. In some embodiments, the nucleic acid-targeting nucleic acid comprises a single-stranded region 3′ of the hairpin of the nexus. In some embodiments, the single-stranded region comprises from 1-10 nucleotides. In some embodiments, the single-stranded region comprises from 2 to 6 nucleotides. In some embodiments, the single-stranded region comprises at least 50% of the length of the natural single-stranded region. In some embodiments, the single-stranded region comprises at least 60% of the length of the natural single-stranded region. In some embodiments, the single-stranded region comprises at least 70% of the length of the natural single-stranded region. In some embodiments, the single-stranded region comprises at least 80% of the length of the natural single-stranded region. In some embodiments, the single-stranded region comprises the natural single-stranded region of the nucleic acid-targeting nucleic acid. In some embodiments, the single-stranded region comprises a non-natural single stranded region. In some embodiments, the composition further comprises one or more hairpins 3′ of the single-stranded region.

### INCORPORATION BY REFERENCE

[0017] The subject matter of U.S. application Ser. No. 14/206,319 filed Mar. 12, 2014 [Attorney Docket No. 44287-722.201] is incorporated herein by reference in its entirety.

[0018] All publications, patents, and patent applications mentioned in this specification are herein incorporated by reference to the same extent as if each individual publication, patent, or patent application was specifically and individually indicated to be incorporated by reference.

### BRIEF DESCRIPTION OF THE DRAWINGS

[0019] The novel features of the invention are set forth with particularity in the appended claims. A better understanding of the features and advantages of the present invention will be obtained by reference to the following detailed description that sets forth illustrative embodiments, in which the principles of the invention are utilized, and the accompanying drawings of which:

[0020] FIG. 1A depicts an exemplary embodiment of a single guide nucleic acid-targeting nucleic acid of the disclosure.

[0021] FIG. 1B depicts an exemplary embodiment of a single guide nucleic acid-targeting nucleic acid of the disclosure.

[0022] FIG. 2 depicts an exemplary embodiment of a double guide nucleic acid-targeting nucleic acid of the disclosure.

[0023] FIG. 3A-D shows an overview of illustrative variants of a nucleic acid-targeting nucleic acid. FIG. 3A depicts an overview and nomenclature of modules for a single guide RNA (sgRNA) of the Streptococcus pyogenes (S. pyogenes) Cas9. The modules can include for example, spacer region, upper stem, bulge, lower stem, nexus (i.e. a region comprising a hairpin 3′ of the first stem-loop duplex structure), and hairpins. FIG. 3B shows illustrative sgRNA variants (guide RNA variants). Altered modules of the sgRNA are shown, and mutated nucleotides are represented in bold. Biochemical (FIG. 3C) and cell-based T7E1 (FIG. 3D) DNA cleavage assays were performed with each guide RNA variant in combination with the S. pyogenes Cas9. Results are representative of at least three independent experiments.

[0024] FIG. 4 shows results of Cas9 cleavage of an AAVS1 DNA fragment measured from cells (HEK-293 T7E1) and biochemically (Biochemical). Upper gel panel shows results of T7E1 assay for indel detection of AAVS1 DNA from HEK293-Cas9 cells transfected with guide RNA variants. Lower panel shows Cas9-guide variant mediated cleavage of the same AAVS target fragment in vitro. Three experimental replicates of guide variants were performed for cell based and biochemical assays (replicates not shown). 100 bp ladder (NEB) serves as marker (left lane).

[0025] FIG. 5 shows results of biochemical (top panel) and cell-based T7E1 (bottom panel) DNA cleavage assays performed with illustrative guide RNA variants for the VEGFA GX20 spacer.

[0026] FIG. 6 shows results of biochemical (top panel) and cell-based T7E1 (bottom panel) DNA cleavage assays performed with illustrative guide RNA variants for the EMX-1 GX20 spacer.

[0027] FIG. 7 shows results of biochemical (top panel) and cell-based T7E1 (bottom panel) DNA cleavage assays performed with illustrative guide RNA variants for the VEGFA GX19 spacer.

[0028] FIG. 8 shows results of biochemical (top panel) and cell-based T7E1 (bottom panel) DNA cleavage assays performed with illustrative guide RNA variants for the EMX-1 GX19 spacer.

[0029] FIGS. 9A and B show biochemical cleavage of potential off-target sites for EMX-1 and VEGFA GX20 spacers. PCR products were amplified from HEK-293 genomic DNA and cleaved with GX20 sgRNA/Cas9 complexes

[0030] FIG. 10A-C shows on- and off-target assays for spacers targeting different human genes (DNMT3A, DNMT3B, CCR5, EMX-1, C4BPB, RNF2, FANCF, and VEGFA) using GX20 sgRNAs.

[0031] FIGS. 11A and B shows on- and off-target sequences for targets in human genome (DNMT3A, DNMT3B, CCR5, EMX-1, C4BPB, RNF2, FANCF, and VEGFA).

[0032] FIG. 12A-D shows T7E1 assays at on and off-target sites for GX19, GX20 and GGX20 sgRNAs.

[0033] FIGS. 13A and B shows AX19, CX19, TX19, GX19, GX20 spacer sequences for EMX-1 and VEGFA sgRNAs. FIG. 13A illustrates that transcription yields are significantly reduced for the AX19, CX19 and TX19 sgRNAs. FIG. 13B illustrates results of biochemical activity (in vitro) and cell-based assay (in vivo). Biochemical activity (in vitro) for each of the sgRNAs shows that activity appears to correlate with sgRNA concentration. Cell-based assays (in vivo) for the same sgRNA show equivalent on-target activity for VEGFA, but not for EMX-1.

[0034] FIG. 14 shows a comparison of activity for EMX-1 GX19 and GX20 guide RNA variants at on- and off-target sites. Guide RNA variants do not alter the off-target activity for the EMX-1 spacer.

[0035] FIGS. 15A and B show comparison of activity for VEGFA GX19 guide RNA variants at on- and off-target sites. A subset of guide RNA variants result in reduced activity at off-target sites, while retaining activity at on-target sites. FIG. 15B shows a comparison of on- and off-target activity for control sgRNA, GV-15 and GV19.

[0036] FIG. 16 shows the activity of guide RNA variants with either the first or second hairpin deleted. Boxes represent illustrative modifications.

[0037] FIG. 17 shows the activity of engineered guide RNA variants with altered nexus. Boxes represent illustrative modifications.

[0038] FIG. 18 shows the activity of engineered guide RNA variants with an increased loop in the nexus hairpin. Boxes represent illustrative modifications.

[0039] FIG. 19 shows biochemical activity of Cas9 and GX20 and NX19 engineered nucleic acid-targeting nucleic acids. The figure shows cleavage of double-stranded DNA amplified from human genomic DNA comprising an on-target protospacer and four off-target protospacers. GX20 engineered nucleic acid-targeting nucleic acids demonstrate a higher ratio of on-target activity to off-target activity compared with other engineered nucleic acid-targeting nucleic acids.

### DETAILED DESCRIPTION

### Definitions

[0040] As used herein, “affinity tag” can refer to either a peptide affinity tag or a nucleic acid affinity tag. Affinity tag generally refers to a protein or nucleic acid sequence that can be bound to a molecule (e.g., bound by a small molecule, protein, covalent bond). An affinity tag can be a non-native sequence. A peptide affinity tag can comprise a peptide. A peptide affinity tag can be one that is able to be part of a split system (e.g., two inactive peptide fragments can combine together in trans to form an active affinity tag). A nucleic acid affinity tag can comprise a nucleic acid. A nucleic acid affinity tag can be a sequence that can selectively bind to a known nucleic acid sequence (e.g. through hybridization). A nucleic acid affinity tag can be a sequence that can selectively bind to a protein. An affinity tag can be fused to a native protein. An affinity tag can be fused to a nucleotide sequence. Sometimes, one, two, or a plurality of affinity tags can be fused to a native protein or nucleotide sequence. An affinity tag can be introduced into a nucleic acid-targeting nucleic acid using methods of in vitro or in vivo transcription. Nucleic acid affinity tags can include, for example, a chemical tag, an RNA-binding protein binding sequence, a DNA-binding protein binding sequence, a sequence hybridizable to an affinity-tagged polynucleotide, a synthetic RNA aptamer, or a synthetic DNA aptamer. Examples of chemical nucleic acid affinity tags can include, but are not limited to, ribo-nucleotriphosphates containing biotin, fluorescent dyes, and digoxeginin. Examples of protein-binding nucleic acid affinity tags can include, but are not limited to, the MS2 binding sequence, the U1A binding sequence, stem-loop binding protein sequences, the boxB sequence, the eIF4A sequence, or any sequence recognized by an RNA binding protein. Examples of nucleic acid affinity-tagged oligonucleotides can include, but are not limited to, biotinylated oligonucleotides, 2,4-dinitrophenyl oligonucleotides, fluorescein oligonucleotides, and primary amine-conjugated oligonucleotides.

[0041] A nucleic acid affinity tag can be an RNA aptamer. Aptamers can include, aptamers that bind to theophylline, streptavidin, dextran B512, adenosine, guanosine, guanine/xanthine, 7-methyl-GTP, amino acid aptamers such as aptamers that bind to arginine, citrulline, valine, tryptophan, cyanocobalamine, N-methylmesoporphyrin IX, flavin, NAD, and antibiotic aptamers such as aptamers that bind to tobramycin, neomycin, lividomycin, kanamycin, streptomycin, viomycin, and chloramphenicol.

[0042] A nucleic acid affinity tag can comprise an RNA sequence that can be bound by a site-directed polypeptide. The site-directed polypeptide can be conditionally enzymatically inactive. The RNA sequence can comprise a sequence that can be bound by a member of Type I, Type II, and/or Type III CRISPR systems. The RNA sequence can be bound by a RAMP family member protein. The RNA sequence can be bound by a Cas6 family member protein (e.g., Csy4, Cas6). The RNA sequence can be bound by a Cas5 family member protein (e.g., Cas5). For example, Csy4 can bind to a specific RNA hairpin sequence with high affinity (Kd˜50 pM) and can cleave RNA at a site 3′ to the hairpin. The Cas5 or Cas6 family member protein can bind an RNA sequence that comprises at least about or at most about 30%, 40%, 50%, 60%, 70%, 75%, 80%, 85%, 90%, 95%, or 100% sequence identity and/or sequence similarity to the following nucleotide sequences:

5′-GUUCACUGCCGUAUAGGCAGCUAAGAAA-3′;
5′-GUUCACUGCCGUAUAGGCAGCUAAGAAA-3′
5′-GUUGCAAGGGAUUGAGCCCCGUAAGGGGAUUGCGAC-3′;
5′-GUUGCAAACCUCGUUAGCCUCGUAGAGGAUUGAAAC-3′;
5′-GGAUCGAUACCCACCCCGAAGAAAAGGGGACGAGAAC-3′;
5′-GUCGUCAGACCCAAAACCCCGAGAGGGGACGGAAAC-3′;
5′-GAUAUAAACCUAAUUACCUCGAGAGGGGACGGAAAC-3′;
5′-CCCCAGUCACCUCGGGAGGGGACGGAAAC-3′;
5′-GUUCCAAUUAAUCUUAAACCCUAUUAGGGAUUGAAAC-3′.
5′-GUUGCAAGGGAUUGAGCCCCGUAAGGGGAUUGCGAC-3′;
5′-GUUGCAAACCUCGUUAGCCUCGUAGAGGAUUGAAAC-3′;
5′-GGAUCGAUACCCACCCCGAAGAAAAGGGGACGAGAAC-3′;
5′-GUCGUCAGACCCAAAACCCCGAGAGGGGACGGAAAC-3′;
5′-GAUAUAAACCUAAUUACCUCGAGAGGGGACGGAAAC-3′;
5′-CCCCAGUCACCUCGGGAGGGGACGGAAAC-3′;
5′-GUUCCAAUUAAUCUUAAACCCUAUUAGGGAUUGAAAC-3′,
5′-GUCGCCCCCCACGCGGGGGCGUGGAUUGAAAC-3′;
5′-CCAGCCGCCUUCGGGCGGCUGUGUGUUGAAAC-3′;
5′-GUCGCACUCUACAUGAGUGCGUGGAUUGAAAU-3′;
5′-UGUCGCACCUUAUAUAGGUGCGUGGAUUGAAAU-3′;
and
5′-GUCGCGCCCCGCAUGGGGCGCGUGGAUUGAAA-3′,

[0043] A nucleic acid affinity tag can comprise a DNA sequence that can be bound by a site-directed polypeptide. The site-directed polypeptide can be conditionally enzymatically inactive. The DNA sequence can comprise a sequence that can be bound by a member of the Type I, Type II and/or Type III CRISPR system. The DNA sequence can be bound by an Argonaut protein. The DNA sequence can be bound by a protein containing a zinc finger domain, a TALE domain, or any other DNA-binding domain.

[0044] A nucleic acid affinity tag can comprise a ribozyme sequence. Suitable ribozymes can include peptidyl transferase 23S rRNA, RNaseP, Group I introns, Group II introns, GIR1 branching ribozyme, Leadzyme, hairpin ribozymes, hammerhead ribozymes, HDV ribozymes, CPEB3 ribozymes, VS ribozymes, glmS ribozyme, CoTC ribozyme, and synthetic ribozymes.

[0045] Peptide affinity tags can comprise tags that can be used for tracking or purification (e.g., a fluorescent protein, green fluorescent protein (GFP), YFP, RFP, CFP, mCherry, tdTomato, a his tag, (e.g., a 6×His tag), a hemagglutinin (HA) tag, a FLAG tag, a Myc tag, a GST tag, a MBP tag, and chitin binding protein tag, a calmodulin tag, a V5 tag, a streptavidin binding tag, and the like).

[0046] Both nucleic acid and peptide affinity tags can comprise small molecule tags such as biotin, or digitoxin, fluorescent label tags, such as for example, fluoroscein, rhodamin, ALEXA FLUOR dyes, Cyanine3 dye, Cyanine5 dye.

[0047] Nucleic acid affinity tags can be located 5′ to a nucleic acid (e.g., a nucleic acid-targeting nucleic acid, sgRNA, guide RNA variant). Nucleic acid affinity tags can be located 3′ to a nucleic acid. Nucleic acid affinity tags can be located 5′ and 3′ to a nucleic acid. Nucleic acid affinity tags can be located within a nucleic acid. Peptide affinity tags can be located N-terminal to a polypeptide sequence. Peptide affinity tags can be located C-terminal to a polypeptide sequence. Peptide affinity tags can be located N-terminal and C-terminal to a polypeptide sequence. A plurality of affinity tags can be fused to a nucleic acid and/or a polypeptide sequence.

[0048] As used herein, “Cas9” can generally refer to a polypeptide with at least about 5%, 10%, 20%, 30%, 40%, 50%, 60%, 70%, 80%, 90%, 100% sequence identity and/or sequence similarity to a wild type exemplary Cas9 polypeptide, for example, Cas9 from S. pyogenes (SEQ ID NO: 8) or to any of the amino acid sequences set forth in SEQ ID NOs: 1-256 and 795-1346. Cas9 can refer to a polypeptide with at most about 5%, 10%, 20%, 30%, 40%, 50%, 60%, 70%, 80%, 90%, 100% sequence identity and/or sequence similarity to a wild type exemplary Cas9 polypeptide, for example, Cas9 from S. pyogenes (SEQ ID NO: 8) or to any of the amino acid sequences set forth in SEQ ID NOs: 1-256 and 795-1346. Cas9 can refer to the wild-type or a modified form of the Cas9 protein that can comprise an amino acid change such as a deletion, insertion, substitution, variant, mutation, fusion, chimera, or any combination thereof.

[0049] As used herein, a “cell” can generally refer to a biological cell. A cell can be the basic structural, functional and/or biological unit of a living organism. A cell can originate from any organism having one or more cells. Some non-limiting examples include: a prokaryotic cell, eukaryotic cell, a bacterial cell, an archaeal cell, a cell of a single-cell eukaryotic organism, a protozoa cell, a cell from a plant (e.g. cells from plant crops, fruits, vegetables, grains, soy bean, corn, maize, wheat, seeds, tomatoes, rice, cassava, sugarcane, pumpkin, hay, potatoes, cotton, cannabis, tobacco, flowering plants, conifers, gymnosperms, ferns, clubmosses, hornworts, liverworts, mosses), an algal cell, (e.g., Botryococcus braunii, Chlamydomonas reinhardtii, Nannochloropsis gaditana, Chlorella pyrenoidosa, Sargassum patens C. Agardh, and the like), seaweeds (e.g. kelp) a fungal cell (e.g., a yeast cell, a cell from a mushroom), an animal cell, a cell from an invertebrate animal (e.g. fruit fly, cnidarian, echinoderm, nematode, etc.), a cell from a vertebrate animal (e.g., fish, amphibian, reptile, bird, mammal), and a cell from a mammal (e.g., a pig, a cow, a goat, a sheep, a rodent, a rat, a mouse, a non-human primate, and a human). Sometimes a cell is not originating from a natural organism (e.g. a cell can be a synthetically made, sometimes termed an artificial cell).

[0050] A cell can be in vitro. A cell can be in vivo. A cell can be an isolated cell. A cell can be a cell inside of an organism. A cell can be an organism. A cell can be a cell in a cell culture. A cell can be one of a collection of cells. A cell can be a prokaryotic cell or derived from a prokaryotic cell. A cell can be a bacterial cell or can be derived from a bacterial cell. A cell can be an archaeal cell or derived from an archaeal cell. A cell can be a eukaryotic cell or derived from a eukaryotic cell. A cell can be a plant cell or derived from a plant cell. A cell can be an animal cell or derived from an animal cell. A cell can be an invertebrate cell or derived from an invertebrate cell. A cell can be a vertebrate cell or derived from a vertebrate cell. A cell can be a mammalian cell or derived from a mammalian cell. A cell can be a rodent cell or derived from a rodent cell. A cell can be a human cell or derived from a human cell. A cell can be a microbe cell or derived from a microbe cell. A cell can be a fungi cell or derived from a fungi cell.

[0051] A cell can be a stem cell or progenitor cell. Cells can include stem cells (e.g., adult stem cells, embryonic stem cells, iPS cells) and progenitor cells (e.g., cardiac progenitor cells, neural progenitor cells, etc.). Cells can include mammalian stem cells and progenitor cells, including rodent stem cells, rodent progenitor cells, human stem cells, human progenitor cells, etc. Clonal cells can comprise the progeny of a cell. A cell can comprise a target nucleic acid. A cell can be in a living organism. A cell can be a genetically modified cell. A cell can be a host cell.

[0052] A cell can be a totipotent stem cell, however, in some embodiments of this disclosure, the term “cell” may be used but may not refer to a totipotent stem cell. A cell can be a plant cell, but in some embodiments of this disclosure, the term “cell” may be used but may not refer to a plant cell. A cell can be a pluripotent cell. For example, a cell can be a pluripotent hematopoietic cell that can differentiate into other cells in the hematopoietic cell lineage but may not be able to differentiate into any other non-hematopoetic cell. A cell may be able to develop into a whole organism. A cell may or may not be able to develop into a whole organism. A cell may be a whole organism.

[0053] A cell can be a primary cell. For example, cultures of primary cells can be passaged 0 times, 1 time, 2 times, 4 times, 5 times, 10 times, 15 times or more. Cells can be unicellular organisms. Cells can be grown in culture.

[0054] A cell can be a diseased cell. A diseased cell can have altered metabolic, gene expression, and/or morphologic features. A diseased cell can be a cancer cell, a diabetic cell, and an apoptotic cell. A diseased cell can be a cell from a diseased subject. Exemplary diseases can include blood disorders, cancers, metabolic disorders, eye disorders, organ disorders, musculoskeletal disorders, cardiac disease, and the like.

[0055] If the cells are primary cells, they may be harvested from an individual by any method. For example, leukocytes may be harvested by apheresis, leukocytapheresis, density gradient separation, etc. Cells from tissues such as skin, muscle, bone marrow, spleen, liver, pancreas, lung, intestine, stomach, etc. can be harvested by biopsy. An appropriate solution may be used for dispersion or suspension of the harvested cells. Such solution can generally be a balanced salt solution, (e.g., normal saline, phosphate-buffered saline (PBS), Hank's balanced salt solution, etc.), conveniently supplemented with fetal calf serum or other naturally occurring factors, in conjunction with an acceptable buffer at low concentration. Buffers can include HEPES, phosphate buffers, lactate buffers, etc. Cells may be used immediately, or they may be stored (e.g., by freezing). Frozen cells can be thawed and can be capable of being reused. Cells can be frozen in a DMSO, serum, medium buffer (e.g., 10% DMSO, 50% serum, 40% buffered medium), and/or some other such common solution used to preserve cells at freezing temperatures.

[0056] As used herein, “crRNA” can generally refer to a nucleic acid with at least about 5%, 10%, 20%, 30%, 40%, 50%, 60%, 70%, 80%, 90%, 100% sequence identity and/or sequence similarity to a wild type exemplary crRNA (e.g., a crRNA from S. pyogenes (e.g., SEQ ID NO: 569), SEQ ID NOs: 563-679). crRNA can generally refer to a nucleic acid with at most about 5%, 10%, 20%, 30%, 40%, 50%, 60%, 70%, 80%, 90%, 100% sequence identity and/or sequence similarity to a wild type exemplary crRNA (e.g., a crRNA from S. pyogenes). crRNA can refer to a modified form of a crRNA that can comprise an nucleotide change such as a deletion, insertion, or substitution, variant, mutation, or chimera. A crRNA can be a nucleic acid having at least about 60% identical to a wild type exemplary crRNA (e.g., a crRNA from S. pyogenes) sequence over a stretch of at least 6 contiguous nucleotides. For example, a crRNA sequence can be at least about 60% identical, at least about 65% identical, at least about 70% identical, at least about 75% identical, at least about 80% identical, at least about 85% identical, at least about 90% identical, at least about 95% identical, at least about 98% identical, at least about 99% identical, or 100% identical, to a wild type exemplary crRNA sequence (e.g., a crRNA from S. pyogenes) over a stretch of at least 6 contiguous nucleotides.

[0057] As used herein, “CRISPR repeat” or “CRISPR repeat sequence” can refer to a minimum CRISPR repeat sequence.

[0058] As used herein, “endoribonuclease” can generally refer to a polypeptide that can cleave RNA. In some embodiments, an endoribonuclease can be a site-directed polypeptide. An endoribonuclease may be a member of a CRISPR system (e.g., Type I, Type II, Type III). Endoribonuclease can refer to a Repeat Associated Mysterious Protein (RAMP) superfamily of proteins (e.g., Cas6, Cas6, Cas5 families). Endoribonucleases can also include RNase A, RNase H, RNase I, RNase III family members (e.g., Drosha, Dicer, RNase N), RNase L, RNase P, RNase PhyM, RNase T1, RNase T2, RNase U2, RNase V1, RNase V. An endoribonuclease can refer to a conditionally enzymatically inactive endoribonuclease. An endoribonuclease can refer to a catalytically inactive endoribonuclease.

[0059] As used herein, “donor polynucleotide” can refer to a nucleic acid that can be integrated into a site during genome engineering or target nucleic acid engineering.

[0060] As used herein, “fixative” or “cross-linker” can generally refer to an agent that can fix or cross-link cells. Fixed or cross-linking cells can stabilize protein-nucleic acid complexes in the cell. Suitable fixatives and cross-linkers can include, formaldehyde, glutaraldehyde, ethanol-based fixatives, methanol-based fixatives, acetone, acetic acid, osmium tetraoxide, potassium dichromate, chromic acid, potassium permanganate, mercurials, picrates, formalin, paraformaldehyde, amine-reactive NHS-ester crosslinkers such as bis[sulfosuccinimidyl] suberate (BS3), 3,3′-dithiobis[sulfosuccinimidylpropionate] (DTSSP), ethylene glycol bis[sulfosuccinimidylsuccinate (sulfo-EGS), disuccinimidyl glutarate (DSG), dithiobis[succinimidyl propionate] (DSP), disuccinimidyl suberate (DSS), ethylene glycol bis[succinimidylsuccinate] (EGS), NHS-ester/diazirine crosslinkers such as NHS-diazirine, NHS-LC-diazirine, NHS-SS-diazirine, sulfo-NHS-diazirine, sulfo-NHS-LC-diazirine, and sulfo-NHS-SS-diazirine.

[0061] As used herein, “fusion” can refer to a protein and/or nucleic acid comprising one or more non-native sequences (e.g., moieties). A fusion can comprise one or more of the same non-native sequences. A fusion can comprise one or more of different non-native sequences. A fusion can be a chimera. A fusion can comprise a nucleic acid affinity tag. A fusion can comprise a barcode. A fusion can comprise a peptide affinity tag. A fusion can provide for subcellular localization of the site-directed polypeptide (e.g., a nuclear localization signal (NLS) for targeting to the nucleus, a mitochondrial localization signal for targeting to the mitochondria, a chloroplast localization signal for targeting to a chloroplast, an endoplasmic reticulum (ER) retention signal, and the like). A fusion can provide a non-native sequence (e.g., affinity tag) that can be used to track or purify. A fusion can be a small molecule such as biotin or a dye such as ALEXA FLUOR dyes, Cyanine3 dye, Cyanine5 dye. The fusion can provide for increased or decreased stability.

[0062] In some embodiments, a fusion can comprise a detectable label, including a moiety that can provide a detectable signal. Suitable detectable labels and/or moieties that can provide a detectable signal can include, but are not limited to, an enzyme, a radioisotope, a member of a specific binding pair; a fluorophore; a fluorescent protein; a quantum dot; and the like.

[0063] A fusion can comprise a member of a FRET pair. FRET pairs (donor/acceptor) suitable for use can include, but are not limited to, EDANS/fluorescein, IAEDANS/fluorescein, fluorescein/tetramethylrhodamine, fluorescein/Cy 5, IEDANS/DABCYL, fluorescein/QSY-7, fluorescein/LC Red 640, fluorescein/Cy 5.5 and fluorescein/LC Red 705.

[0064] A fluorophore/quantum dot donor/acceptor pair can be used as a fusion. Suitable fluorophores (“fluorescent label”) can include any molecule that may be detected via its inherent fluorescent properties, which can include fluorescence detectable upon excitation. Suitable fluorescent labels can include, but are not limited to, fluorescein, rhodamine, tetramethylrhodamine, eosin, erythrosin, coumarin, methyl-coumarins, pyrene, Malacite green, stilbene, Lucifer Yellow, Cascade Blue™, Texas Red, IAEDANS, EDANS, BODIPY FL, LC Red 640, Cy 5, Cy 5.5, LC Red 705 and Oregon green.

[0065] A fusion can comprise an enzyme. Suitable enzymes can include, but are not limited to, horse radish peroxidase, luciferase, beta-galactosidase, and the like.

[0066] A fusion can comprise a fluorescent protein. Suitable fluorescent proteins can include, but are not limited to, a green fluorescent protein (GFP), (e.g., a GFP from Aequoria victoria, fluorescent proteins from Anguilla japonica, or a mutant or derivative thereof), a red fluorescent protein, a yellow fluorescent protein, any of a variety of fluorescent and colored proteins.

[0067] A fusion can comprise a nanoparticle. Suitable nanoparticles can include fluorescent or luminescent nanoparticles, and magnetic nanoparticles. Any optical or magnetic property or characteristic of the nanoparticle(s) can be detected.

[0068] A fusion can comprise quantum dots (QDs). QDs can be rendered water-soluble by applying coating layers comprising a variety of different materials. For example, QDs can be solubilized using amphiphilic polymers. Exemplary polymers that have been employed can include octylamine-modified low molecular weight polyacrylic acid, polyethylene-glycol (PEG)-derivatized phospholipids, polyanhydrides, block copolymers, etc. QDs can be conjugated to a polypeptide via any of a number of different functional groups or linking agents that can be directly or indirectly linked to a coating layer. QDs with a wide variety of absorption and emission spectra are commercially available, e.g., from Quantum Dot Corp. (Hayward Calif.; now owned by Invitrogen) or from Evident Technologies (Troy, N.Y.). For example, QDs having peak emission wavelengths of approximately 525, 535, 545, 565, 585, 605, 655, 705, and 800 nm are available. Thus the QDs can have a range of different colors across the visible portion of the spectrum and in some cases even beyond.

[0069] Suitable radioisotopes can include, but are not limited to ¹⁴C, ³H, ³²P, ³³P, ³⁵S, and ¹²⁵I.

[0070] As used herein, “genetically modified cell” can generally refer to a cell that has been genetically modified. Some non-limiting examples of genetic modifications can include: insertions, deletions, inversions, translocations, gene fusions, or changing one or more nucleotides. A genetically modified cell can comprise a target nucleic acid with an introduced double strand break (e.g., DNA break). A genetically modified cell can comprise an exogenously introduced nucleic acid (e.g., a vector). A genetically modified cell can comprise an exogenously introduced polypeptide of the disclosure and/or nucleic acid of the disclosure. A genetically modified cell can comprise a donor polynucleotide. A genetically modified cell can comprise an exogenous nucleic acid integrated into the genome of the genetically modified cell. A genetically modified cell can comprise a deletion of DNA. A genetically modified cell can also refer to a cell with modified mitochondrial or chloroplast DNA. A genetically modified cell can comprise any modification described herein.

[0071] As used herein, “genome engineering” can refer to a process of modifying a target nucleic acid. Genome engineering can refer to the integration of non-native nucleic acid into native nucleic acid. Genome engineering can refer to the targeting of a site-directed polypeptide and a nucleic acid-targeting nucleic acid to a target nucleic acid, without an integration or a deletion of the target nucleic acid. Genome engineering can refer to the cleavage of a target nucleic acid, and the rejoining of the target nucleic acid without an integration of an exogenous sequence in the target nucleic acid, or a deletion in the target nucleic acid. The native nucleic acid can comprise a gene. The non-native nucleic acid can comprise a donor polynucleotide. In the methods of the disclosure, site-directed polypeptides (e.g., Cas9) can introduce double-stranded breaks in nucleic acid, (e.g. genomic DNA). The double-stranded break can stimulate a cell's endogenous DNA-repair pathways (e.g. homologous recombination (HR) and/or non-homologous end joining (NHEJ), or A-NHEJ (alternative non-homologous end-joining)). Mutations, deletions, alterations, and integrations of foreign, exogenous, and/or alternative nucleic acid can be introduced into the site of the double-stranded DNA break.

[0072] As used herein, the term “isolated” can refer to a nucleic acid or polypeptide that, by the hand of a human, exists apart from its native environment and is therefore not a product of nature. Isolated can mean substantially pure. An isolated nucleic acid or polypeptide can exist in a purified form and/or can exist in a non-native environment such as, for example, in a transgenic cell.

[0073] As used herein, “non-native” can refer to a nucleic acid or polypeptide sequence that is not found in a native nucleic acid or protein. Non-native can refer to affinity tags. Non-native can refer to fusions. Non-native can refer to a naturally occurring nucleic acid or polypeptide sequence that comprises mutations, insertions and/or deletions. A non-native sequence may exhibit and/or encode for an activity (e.g., enzymatic activity, methyltransferase activity, acetyltransferase activity, kinase activity, ubiquitinating activity, etc.) that can also be exhibited by the nucleic acid and/or polypeptide sequence to which the non-native sequence is fused. A non-native nucleic acid or polypeptide sequence may be linked to a naturally-occurring nucleic acid or polypeptide sequence (or a variant thereof) by genetic engineering to generate a chimeric nucleic acid and/or polypeptide sequence encoding a chimeric nucleic acid and/or polypeptide. A non-native sequence can refer to a 3′ hybridizing extension sequence.

[0074] As used herein, a “nucleic acid” can generally refer to a polynucleotide sequence, or fragment thereof. A nucleic acid can comprise nucleotides. A nucleic acid can be exogenous or endogenous to a cell. A nucleic acid can exist in a cell-free environment. A nucleic acid can be a gene or fragment thereof. A nucleic acid can be DNA. A nucleic acid can be RNA. A nucleic acid can comprise one or more analogs (e.g. altered backbone, sugar, or nucleobase). Some non-limiting examples of analogs include: 5-bromouracil, peptide nucleic acid, xeno nucleic acid, morpholinos, locked nucleic acids, glycol nucleic acids, threose nucleic acids, dideoxynucleotides, cordycepin, 7-deaza-GTP, florophores (e.g. rhodamine or flurescein linked to the sugar), thiol containing nucleotides, biotin linked nucleotides, fluorescent base analogs, CpG islands, methyl-7-guanosine, methylated nucleotides, inosine, thiouridine, pseudourdine, dihydrouridine, queuosine, and wyosine.

[0075] As used herein, a “nucleic acid sample” can generally refer to a sample from a biological entity. A nucleic acid sample can comprise nucleic acid. The nucleic acid from the nucleic acid sample can be purified and/or enriched. The nucleic acid sample may show the nature of the whole. Nucleic acid samples can come from various sources. Nucleic acid samples can come from one or more individuals. One or more nucleic acid samples can come from the same individual. One non-limiting example would be if one sample came from an individual's blood and a second sample came from an individual's tumor biopsy. Examples of nucleic acid samples can include but are not limited to, blood, serum, plasma, nasal swab or nasopharyngeal wash, saliva, urine, gastric fluid, spinal fluid, tears, stool, mucus, sweat, earwax, oil, glandular secretion, cerebral spinal fluid, tissue, semen, vaginal fluid, interstitial fluids, including interstitial fluids derived from tumor tissue, ocular fluids, spinal fluid, throat swab, cheek swab, breath, hair, finger nails, skin, biopsy, placental fluid, amniotic fluid, cord blood, emphatic fluids, cavity fluids, sputum, pus, micropiota, meconium, breast milk, buccal samples, nasopharyngeal wash, other excretions, or any combination thereof. Nucleic acid samples can originate from tissues. Examples of tissue samples may include but are not limited to, connective tissue, muscle tissue, nervous tissue, epithelial tissue, cartilage, cancerous or tumor sample, bone marrow, or bone. The nucleic acid sample may be provided from a human or animal. The nucleic acid sample may be provided from a mammal, vertebrate, such as murines, simians, humans, farm animals, sport animals, or pets. The nucleic acid sample may be collected from a living or dead subject. The nucleic acid sample may be collected fresh from a subject or may have undergone some form of pre-processing, storage, or transport.

[0076] A nucleic acid sample can comprise a target nucleic acid. A nucleic acid sample can originate from cell lysate. The cell lysate can originate from a cell.

[0077] As used herein, “nucleic acid-targeting nucleic acid” can refer to a nucleic acid that can hybridize to another nucleic acid. A nucleic acid-targeting nucleic acid can be RNA. A nucleic acid-targeting nucleic acid can be DNA. A nucleic acid-targeting nucleic acid can comprise DNA and RNA residues, for example, a DNA/RNA hybrid. The nucleic acid-targeting nucleic acid can be programmed to bind to a sequence of nucleic acid site-specifically. The nucleic acid to be targeted, or the target nucleic acid, can comprise nucleotides. The nucleic acid-targeting nucleic acid can comprise nucleotides. A portion of the target nucleic acid can be complementary to a portion of the nucleic acid-targeting nucleic acid. A nucleic acid-targeting nucleic acid can comprise a polynucleotide chain and can be called a “single guide nucleic acid” (i.e. a “single guide nucleic acid-targeting nucleic acid”). A nucleic acid-targeting nucleic acid can comprise two polynucleotide chains and can be called a “double guide nucleic acid” (i.e. a “double guide nucleic acid-targeting nucleic acid”). A nucleic acid-targeting nucleic acid can be a single guide RNA (sgRNA). A nucleic acid-targeting nucleic acid can be a guide RNA variant. If not otherwise specified, the term “nucleic acid-targeting nucleic acid” can be inclusive, referring to both single guide nucleic acids and double guide nucleic acids.

[0078] A nucleic acid-targeting nucleic acid can comprise a segment that can be referred to as a “nucleic acid-targeting segment” or a “nucleic acid-targeting sequence,” (eg., “a spacer”). A nucleic acid-targeting nucleic acid can comprise a segment that can be referred to as a “protein binding segment” or “protein binding sequence.”

[0079] A nucleic acid-targeting nucleic acid can comprise one or more modifications (e.g., a base modification, a backbone modification), to provide the nucleic acid with a new or enhanced feature (e.g., improved stability). A nucleic acid-targeting nucleic acid can comprise a nucleic acid affinity tag. A nucleoside can be a base-sugar combination. The base portion of the nucleoside can be a heterocyclic base. The two most common classes of such heterocyclic bases are the purines and the pyrimidines. Purines can be adenine and guanine Pyrimidines can be cytosine, uracil, and thymine. Nucleotides can be nucleosides that further include a phosphate group covalently linked to the sugar portion of the nucleoside (e.g., nucleoside di-phosphate, nucleoside tri-phosphate). For those nucleosides that include a pentofuranosyl sugar, the phosphate group can be linked to the 2′, the 3′, or the 5′ hydroxyl moiety of the sugar. In forming nucleic acid-targeting nucleic acids, the phosphate groups can covalently link adjacent nucleosides to one another to form a linear polymeric compound. In turn, the respective ends of this linear polymeric compound can be further joined to form a circular compound; however, linear compounds are generally suitable. In addition, linear compounds may have internal nucleotide base complementarity and may therefore fold in a manner as to produce a fully or partially double-stranded compound. Within nucleic acid-targeting nucleic acids, the phosphate groups can commonly be referred to as forming the internucleoside backbone of the nucleic acid-targeting nucleic acid. The linkage or backbone of the nucleic acid-targeting nucleic acid can be a 3′ to 5′ phosphodiester linkage. As used herein, the purine and pyrimidine bases of adenine, guanine, cytosine, uracil, and thymine, can refer to the nucleoside form, the nucleotide form, the nucleoside di-phosphate form and/or, the nucleoside tri-phosphate form of the base.

[0080] A nucleic acid-targeting nucleic acid can comprise a modified backbone and/or modified internucleoside linkages. Modified backbones can include those that retain a phosphorus atom in the backbone and those that do not have a phosphorus atom in the backbone.

[0081] Suitable modified nucleic acid-targeting nucleic acid backbones containing a phosphorus atom therein can include, for example, phosphorothioates, chiral phosphorothioates, phosphorodithioates, phosphotriesters, aminoalkylphosphotriesters, methyl and other alkyl phosphonates such as 3′-alkylene phosphonates, 5′-alkylene phosphonates, chiral phosphonates, phosphinates, phosphoramidates including 3′-amino phosphoramidate and aminoalkylphosphoramidates, phosphorodiamidates, thionophosphoramidates, thionoalkylphosphonates, thionoalkylphosphotriesters, selenophosphates, and boranophosphates having normal 3′-5′ linkages, 2′-5′ linked analogs, and those having inverted polarity wherein one or more internucleotide linkages is a 3′ to 3′, a 5′ to 5′ or a 2′ to 2′ linkage. Suitable nucleic acid-targeting nucleic acids having inverted polarity can comprise a single 3′ to 3′ linkage at the 3′-most internucleotide linkage (i.e. a single inverted nucleoside residue in which the nucleobase is missing or has a hydroxyl group in place thereof). Various salts (e.g., potassium chloride or sodium chloride), mixed salts, and free acid forms can also be included.

[0082] A nucleic acid-targeting nucleic acid can comprise one or more phosphorothioate and/or heteroatom internucleoside linkages, in particular —CH₂—NH—O—CH₂—, —CH₂—N(CH₃)—O—CH₂— (i.e. a methylene (methylimino) or MMI backbone), —CH₂—O—N(CH₃)—CH₂—, —CH₂—N(CH₃)—N(CH₃)—CH₂— and —O—N(CH₃)—CH₂—CH₂— (wherein the native phosphodiester internucleotide linkage is represented as —O—P(═O)(OH)—O—CH₂—).

[0083] A nucleic acid-targeting nucleic acid can comprise a morpholino backbone structure. For example, a nucleic acid can comprise a 6-membered morpholino ring in place of a ribose ring. In some of these embodiments, a phosphorodiamidate or other non-phosphodiester internucleoside linkage can replace a phosphodiester linkage.

[0084] A nucleic acid-targeting nucleic acid can comprise polynucleotide backbones that are formed by short chain alkyl or cycloalkyl internucleoside linkages, mixed heteroatom and alkyl or cycloalkyl internucleoside linkages, or one or more short chain heteroatomic or heterocyclic internucleoside linkages. These can include those having morpholino linkages (formed in part from the sugar portion of a nucleoside); siloxane backbones; sulfide, sulfoxide and sulfone backbones; formacetyl and thioformacetyl backbones; methylene formacetyl and thioformacetyl backbones; riboacetyl backbones; alkene containing backbones; sulfamate backbones; methyleneimino and methylenehydrazino backbones; sulfonate and sulfonamide backbones; amide backbones; and others having mixed N, O, S and CH₂ component parts.

[0085] A nucleic acid-targeting nucleic acid can comprise a nucleic acid mimetic. The term “mimetic” can be intended to include polynucleotides wherein only the furanose ring or both the furanose ring and the internucleotide linkage are replaced with non-furanose groups, replacement of only the furanose ring can also be referred as being a sugar surrogate. The heterocyclic base moiety or a modified heterocyclic base moiety can be maintained for hybridization with an appropriate target nucleic acid. One such nucleic acid can be a peptide nucleic acid (PNA). In a PNA, the sugar-backbone of a polynucleotide can be replaced with an amide containing backbone, in particular an aminoethylglycine backbone. The nucleotides can be retained and are bound directly or indirectly to aza nitrogen atoms of the amide portion of the backbone. The backbone in PNA compounds can comprise two or more linked aminoethylglycine units which gives PNA an amide containing backbone. The heterocyclic base moieties can be bound directly or indirectly to aza-nitrogen atoms of the amide portion of the backbone.

[0086] A nucleic acid-targeting nucleic acid can comprise linked morpholino units (i.e. morpholino nucleic acid) having heterocyclic bases attached to the morpholino ring Linking groups can link the morpholino monomeric units in a morpholino nucleic acid. Non-ionic morpholino-based oligomeric compounds can have less undesired interactions with cellular proteins. Morpholino-based polynucleotides can be nonionic mimics of nucleic acid-targeting nucleic acids. A variety of compounds within the morpholino class can be joined using different linking groups. A further class of polynucleotide mimetic can be referred to as cyclohexenyl nucleic acids (CeNA). The furanose ring normally present in a nucleic acid molecule can be replaced with a cyclohexenyl ring. CeNA DMT protected phosphoramidite monomers can be prepared and used for oligomeric compound synthesis using phosphoramidite chemistry. The incorporation of CeNA monomers into a nucleic acid chain can increase the stability of a DNA/RNA hybrid. CeNA oligoadenylates can form complexes with nucleic acid complements with similar stability to the native complexes. A further modification can include Locked Nucleic Acids (LNAs) in which the 2′-hydroxyl group is linked to the 4′ carbon atom of the sugar ring thereby forming a 2′-C,4′-C-oxymethylene linkage thereby forming a bicyclic sugar moiety. The linkage can be a methylene (—CH2-), group bridging the 2′ oxygen atom and the 4′ carbon atom wherein n is 1 or 2. LNA and LNA analogs can display very high duplex thermal stabilities with complementary nucleic acid (Tm=+3 to +10° C.), stability towards 3′-exonucleolytic degradation and good solubility properties.

[0087] A nucleic acid-targeting nucleic acid can comprise one or more substituted sugar moieties. Suitable polynucleotides can comprise a sugar substituent group selected from: OH; F; O-, S-, or N-alkyl; O-, S-, or N-alkenyl; O-, S- or N-alkynyl; or O-alkyl-O-alkyl, wherein the alkyl, alkenyl and alkynyl may be substituted or unsubstituted C₁ to C₁₀ alkyl or C₂ to C₁₀ alkenyl and alkynyl. Particularly suitable are O((CH2)nO) mCH₃, O(CH₂)—OCH₃, O(CH₂)—NH2, O(CH₂)ₙCH₃, O(CH₂)ₙONH₂, and O(CH₂)ₙON((CH₂)ₙCH₃)₂, where n and m are from 1 to about 10. A sugar substituent group can be selected from: C₁ to C₁₀ lower alkyl, substituted lower alkyl, alkenyl, alkynyl, alkaryl, aralkyl, O-alkaryl or O-aralkyl, SH, SCH₃, OCN, Cl, Br, CN, CF₃, OCF₃, SOCH₃, SO₂CH₃, ONO₂, NO₂, N₃, NH₂, heterocycloalkyl, heterocycloalkaryl, aminoalkylamino, polyalkylamino, substituted silyl, an RNA cleaving group, a reporter group, an intercalator, a group for improving the pharmacokinetic properties of an nucleic acid-targeting nucleic acid, or a group for improving the pharmacodynamic properties of an nucleic acid-targeting nucleic acid, and other substituents having similar properties. A suitable modification can include 2′-methoxyethoxy (2′-O—CH₂CH₂OCH₃, also known as 2′-O-(2-methoxyethyl) or 2′-MOE i.e., an alkoxyalkoxy group). A further suitable modification can include 2′-dimethylaminooxyethoxy, (i.e., a O(CH₂)₂ON(CH₃)₂ group, also known as 2′-DMAOE), and 2′-dimethylaminoethoxyethoxy (also known as 2′-O-dimethyl-amino-ethoxy-ethyl or 2′-DMAEOE), i.e., 2′-O—CH2-O—CH₂—N(CH₃)₂.

[0088] Other suitable sugar substituent groups can include methoxy (—O—CH₃), aminopropoxy (—OCH₂CH₂CH₂NH₂), allyl (—CH₂—CH═CH₂), —O-allyl (—O—CH₂═CH═CH₂) and fluoro (F). 2′-sugar substituent groups may be in the arabino (up) position or ribo (down) position. A suitable 2′-arabino modification is 2′-F. Similar modifications may also be made at other positions on the oligomeric compound, particularly the 3′ position of the sugar on the 3′ terminal nucleoside or in 2′-5′ linked nucleotides and the 5′ position of 5′ terminal nucleotide. Oligomeric compounds may also have sugar mimetics such as cyclobutyl moieties in place of the pentofuranosyl sugar.

[0089] A nucleic acid-targeting nucleic acid may also include nucleobase (often referred to simply as “base”) modifications or substitutions. As used herein, “unmodified” or “natural” nucleobases can include the purine bases, (e.g. adenine (A) and guanine (G)), and the pyrimidine bases, (e.g. thymine (T), cytosine (C) and uracil (U)). Modified nucleobases can include other synthetic and natural nucleobases such as 5-methylcytosine (5-me-C), 5-hydroxymethyl cytosine, xanthine, hypoxanthine, 2-aminoadenine, 6-methyl and other alkyl derivatives of adenine and guanine, 2-propyl and other alkyl derivatives of adenine and guanine, 2-thiouracil, 2-thiothymine and 2-thiocytosine, 5-halouracil and cytosine, 5-propynyl (—C═C—CH3) uracil and cytosine and other alkynyl derivatives of pyrimidine bases, 6-azo uracil, cytosine and thymine, 5-uracil (pseudouracil), 4-thiouracil, 8-halo, 8-amino, 8-thiol, 8-thioalkyl, 8-hydroxyl and other 8-substituted adenines and guanines, 5-halo particularly 5-bromo, 5-trifluoromethyl and other 5-substituted uracils and cytosines, 7-methylguanine and 7-methyladenine, 2-F-adenine, 2-aminoadenine, 8-azaguanine and 8-azaadenine, 7-deazaguanine and 7-deazaadenine and 3-deazaguanine and 3-deazaadenine. Modified nucleobases can include tricyclic pyrimidines such as phenoxazine cytidine (1H-pyrimido(5,4-b)(1,4)benzoxazin-2(3H)-one), phenothiazine cytidine (1H-pyrimido(5,4-b)(1,4)benzothiazin-2(3H)-one), G-clamps such as a substituted phenoxazine cytidine (e.g. 9-(2-aminoethoxy)-H-pyrimido(5,4-(b) (1,4)benzoxazin-2(3H)-one), carbazole cytidine (2H-pyrimido(4,5-b)indol-2-one), pyridoindole cytidine (Hpyrido(3′,2′:4,5)pyrrolo(2,3-d)pyrimidin-2-one).

[0090] Heterocyclic base moieties can include those in which the purine or pyrimidine base is replaced with other heterocycles, for example 7-deaza-adenine, 7-deazaguanosine, 2-aminopyridine and 2-pyridone. Nucleobases can be useful for increasing the binding affinity of a polynucleotide compound. These can include 5-substituted pyrimidines, 6-azapyrimidines and N-2, N-6 and O-6 substituted purines, including 2-aminopropyladenine, 5-propynyluracil and 5-propynylcytosine. 5-methylcytosine substitutions can increase nucleic acid duplex stability by 0.6-1.2° C. and can be suitable base substitutions (e.g., when combined with 2′-O-methoxyethyl sugar modifications).

[0091] A modification of a nucleic acid-targeting nucleic acid can comprise chemically linking to the nucleic acid-targeting nucleic acid one or more moieties or conjugates that can enhance the activity, cellular distribution or cellular uptake of the nucleic acid-targeting nucleic acid. These moieties or conjugates can include conjugate groups covalently bound to functional groups such as primary or secondary hydroxyl groups. Conjugate groups can include, but are not limited to, intercalators, reporter molecules, polyamines, polyamides, polyethylene glycols, polyethers, groups that enhance the pharmacodynamic properties of oligomers, and groups that can enhance the pharmacokinetic properties of oligomers. Conjugate groups can include, but are not limited to, cholesterols, lipids, phospholipids, biotin, phenazine, folate, phenanthridine, anthraquinone, acridine, fluoresceins, rhodamines, coumarins, and dyes. Groups that enhance the pharmacodynamic properties include groups that improve uptake, enhance resistance to degradation, and/or strengthen sequence-specific hybridization with the target nucleic acid. Groups that can enhance the pharmacokinetic properties include groups that improve uptake, distribution, metabolism or excretion of a nucleic acid. Conjugate moieties can include but are not limited to lipid moieties such as a cholesterol moiety, cholic acid a thioether, (e.g., hexyl-S-tritylthiol), a thiocholesterol, an aliphatic chain (e.g., dodecandiol or undecyl residues), a phospholipid (e.g., di-hexadecyl-rac-glycerol or triethylammonium 1,2-di-O-hexadecyl-rac-glycero-3-H-phosphonate), a polyamine or a polyethylene glycol chain, or adamantane acetic acid, a palmityl moiety, or an octadecylamine or hexylamino-carbonyl-oxycholesterol moiety.

[0092] A modification may include a “Protein Transduction Domain” or PTD (i.e. a cell penetrating peptide (CPP)). The PTD can refer to a polypeptide, polynucleotide, carbohydrate, or organic or inorganic compound that facilitates traversing a lipid bilayer, micelle, cell membrane, organelle membrane, or vesicle membrane. A PTD can be attached to another molecule, which can range from a small polar molecule to a large macromolecule and/or a nanoparticle, and can facilitate the molecule traversing a membrane, for example going from extracellular space to intracellular space, or cytosol to within an organelle. A PTD can be covalently linked to the amino terminus of a polypeptide. A PTD can be covalently linked to the carboxyl terminus of a polypeptide. A PTD can be covalently linked to a nucleic acid. Exemplary PTDs can include, but are not limited to, a minimal peptide protein transduction domain; a polyarginine sequence comprising a number of arginines sufficient to direct entry into a cell (e.g., 3, 4, 5, 6, 7, 8, 9, 10, or 10-50 arginines), a VP22 domain, a Drosophila Antennapedia protein transduction domain, a truncated human calcitonin peptide, polylysine, and transportan, arginine homopolymer of from 3 arginine residues to 50 arginine residues. The PTD can be an activatable CPP (ACPP). ACPPs can comprise a polycationic CPP (e.g., Arg9 or “R9”) connected via a cleavable linker to a matching polyanion (e.g., Glu9 or “E9”), which can reduce the net charge to nearly zero and thereby inhibits adhesion and uptake into cells. Upon cleavage of the linker, the polyanion can be released, locally unmasking the polyarginine and its inherent adhesiveness, thus “activating” the ACPP to traverse the membrane.

[0093] “Nucleotide” can generally refer to a base-sugar-phosphate combination. A nucleotide can comprise a synthetic nucleotide. A nucleotide can comprise a synthetic nucleotide analog. Nucleotides can be monomeric units of a nucleic acid sequence (e.g. deoxyribonucleic acid (DNA) and ribonucleic acid (RNA)). The term nucleotide can include ribonucleoside triphosphates adenosine triphosphate (ATP), uridine triphosphate (UTP), cytosine triphosphate (CTP), guanosine triphosphate (GTP) and deoxyribonucleoside triphosphates such as dATP, dCTP, dITP, dUTP, dGTP, dTTP, or derivatives thereof. Such derivatives can include, for example, [αS]dATP, 7-deaza-dGTP and 7-deaza-dATP, and nucleotide derivatives that confer nuclease resistance on the nucleic acid molecule containing them. The term nucleotide as used herein can refer to dideoxyribonucleoside triphosphates (ddNTPs) and their derivatives. Illustrative examples of dideoxyribonucleoside triphosphates can include, but are not limited to, ddATP, ddCTP, ddGTP, ddITP, and ddTTP. A nucleotide may be unlabeled or detectably labeled by well-known techniques. Labeling can also be carried out with quantum dots. Detectable labels can include, for example, radioactive isotopes, fluorescent labels, chemiluminescent labels, bioluminescent labels and enzyme labels. Fluorescent labels of nucleotides may include but are not limited fluorescein, 5-carboxyfluorescein (FAM), 2′7′-dimethoxy-4′5-dichloro-6-carboxyfluorescein (JOE), rhodamine, 6-carboxyrhodamine (R6G), N,N,N′,N′-tetramethyl-6-carboxyrhodamine (TAMRA), 6-carboxy-X-rhodamine (ROX), 4-(4′dimethylaminophenylazo) benzoic acid (DABCYL), Cascade Blue, Oregon Green, Texas Red, Cyanine and 5-(2′-aminoethyl)aminonaphthalene-1-sulfonic acid (EDANS). Specific examples of fluorescently labeled nucleotides can include [R6G]dUTP, [TAMRA]dUTP, [R110]dCTP, [R6G]dCTP, [TAMRA]dCTP, [JOE]ddATP, [R6G]ddATP, [FAM]ddCTP, [R110]ddCTP, [TAMRA]ddGTP, [ROX]ddTTP, [dR6G]ddATP, [dR110]ddCTP, [dTAMRA]ddGTP, and [dROX]ddTTP available from Perkin Elmer, Foster City, Calif. FluoroLink DeoxyNucleotides, FluoroLink Cy3-dCTP, FluoroLink Cy5-dCTP, FluoroLink Fluor X-dCTP, FluoroLink Cy3-dUTP, and FluoroLink Cy5-dUTP available from Amersham, Arlington Heights, Ill.; Fluorescein-15-dATP, Fluorescein-12-dUTP, Tetramethyl-rodamine-6-dUTP, IR770-9-dATP, Fluorescein-12-ddUTP, Fluorescein-12-UTP, and Fluorescein-15-2′-dATP available from Boehringer Mannheim, Indianapolis, Ind.; and Chromosome Labeled Nucleotides, BODIPY-FL-14-UTP, BODIPY-FL-4-UTP, BODIPY-TMR-14-UTP, BODIPY-TMR-14-dUTP, BODIPY-TR-14-UTP, BODIPY-TR-14-dUTP, Cascade Blue-7-UTP, Cascade Blue-7-dUTP, fluorescein-12-UTP, fluorescein-12-dUTP, Oregon Green 488-5-dUTP, Rhodamine Green-5-UTP, Rhodamine Green-5-dUTP, tetramethylrhodamine-6-UTP, tetramethylrhodamine-6-dUTP, Texas Red-5-UTP, Texas Red-5-dUTP, and Texas Red-12-dUTP available from Molecular Probes, Eugene, Oreg. Nucleotides can also be labeled or marked by chemical modification. A chemically-modified single nucleotide can be biotin-dNTP. Some non-limiting examples of biotinylated dNTPs can include, biotin-dATP (e.g., bio-N6-ddATP, biotin-14-dATP), biotin-dCTP (e.g., biotin-11-dCTP, biotin-14-dCTP), and biotin-dUTP (e.g. biotin-11-dUTP, biotin-16-dUTP, biotin-20-dUTP).

[0094] As used herein, “Nexus” can refer to a region in a nucleic acid-targeting nucleic acid. The nexus confers the binding of a sgRNA or a tracrRNA to its cognate Cas9 protein and confers an apoenzyme to haloenzyme conformational transition.

[0095] As used here, “purified” can refer to a molecule (e.g., site-directed polypeptide, nucleic acid-targeting nucleic acid) that comprises at least 50, 60, 70, 80, 90, 95, 96, 97, 98, 99, or 100% of the composition. For example, a sample that comprises 10% of a site-directed polypeptide, but after a purification step comprises 60% of the site-directed polypeptide, then the sample can be said to be purified. A purified sample can refer to an enriched sample, or a sample that has undergone methods to remove particles other than the particle of interest.

[0096] As used herein, “recombinant” can refer to sequence that originates from a source foreign to the particular host (e.g., cell) or, if from the same source, is modified from its original form. A recombinant nucleic acid in a cell can include a nucleic acid that is endogenous to the particular cell but has been modified through, for example, the use of site-directed mutagenesis. The term can include non-naturally occurring multiple copies of a naturally occurring DNA sequence. Thus, the term can refer to a nucleic acid that is foreign or heterologous to the cell, or homologous to the cell but in a position or form within the cell in which the nucleic acid is not ordinarily found. Similarly, when used in the context of a polypeptide or amino acid sequence, an exogenous polypeptide or amino acid sequence can be a polypeptide or amino acid sequence that originates from a source foreign to the particular cell or, if from the same source, is modified from its original form.

[0097] As used herein, “non-natural nucleic acid-targeting nucleic acid” can refer to a nucleic acid-targeting nucleic acid that has one or more non-naturally occurring regions. A non-naturally occurring nucleic acid-targeting nucleic acids can be selected over naturally occurring forms because of desirable properties such as, for example, reduced off-target effects, enhanced cellular uptake, enhanced affinity for nucleic acid targets, and increased stability in the presence of nucleases. A non-natural nucleic acid-targeting nucleic acid can be a designed nucleic acid-targeting nucleic acid. A non-natural nucleic acid-targeting nucleic acid can be an engineered nucleic acid-targeting nucleic acid. A non-natural nucleic acid-targeting nucleic acid can be an isolated and/or recombinant nucleic acid-targeting nucleic acid.

[0098] As used herein, “control nucleic acid-targeting nucleic acid” can refer to a nucleic acid-targeting nucleic acid that has not been modified. A control nucleic acid-targeting nucleic acid can be a naturally occurring nucleic acid-targeting nucleic acid. A control nucleic acid-targeting nucleic acid can be a wild-type nucleic acid-targeting nucleic acid. A control nucleic acid-targeting nucleic acid can be a non-engineered form of a nucleic acid-targeting nucleic acid.

[0099] As used herein, “site-directed polypeptides” can generally refer to nucleases, site-directed nucleases, endoribonucleases, conditionally enzymatically inactive endoribonucleases, Argonaute, and nucleic acid-binding proteins. A site-directed polypeptide or protein can include nucleases such as homing endonucleases such as PI-TliII, H-DreI, I-DmoI and I-CreI, I-SceI, LAGLIDADG family nucleases, meganucleases, GIY-YIG family nucleases, His-Cys box family nucleases, Vsr-like nucleases, endoribonucleases, exoribonucleases, endonucleases, and exonucleases. A site-directed polypeptide can refer to a Cas gene member of the Type I, Type II, Type III, and/or Type U CRISPR/Cas systems. A site-directed polypeptide can refer to a member of the Repeat Associated Mysterious Protein (RAMP) superfamily (e.g., Cas5, Cas6 subfamilies). A site-directed polypeptide can refer to an Argonaute protein.

[0100] A site-directed polypeptide can be a type of protein. A site-directed polypeptide can refer to a nuclease. A site-directed polypeptide can refer to an endoribonuclease. A site-directed polypeptide can refer to any modified (e.g., shortened, mutated, lengthened) polypeptide sequence or homologue of the site-directed polypeptide. A site-directed polypeptide can be codon optimized. A site-directed polypeptide can be a codon-optimized homologue of a site-directed polypeptide. A site-directed polypeptide can be enzymatically inactive, partially active, constitutively active, fully active, inducible active and/or more active, (e.g. more than the wild type homologue of the protein or polypeptide.). A site-directed polypeptide can be Cas9. A site-directed polypeptide can be Csy4. A site-directed polypeptide can be Cas5 or a Cas5 family member. A site-directed polypeptide can be Cas6 or a Cas6 family member. SEQ ID NOs: 1-256 and 795-1346 provide a non-limiting and non-exhaustive list of naturally occurring Cas9/Csn1 endonucleases that can be used as site-directed polypeptides in the wild-type, variant, or mutated form.

[0101] In some instances, the site-directed polypeptide (e.g., variant, mutated, enzymatically inactive and/or conditionally enzymatically inactive site-directed polypeptide) can target nucleic acid. The site-directed polypeptide (e.g., variant, mutated, enzymatically inactive and/or conditionally enzymatically inactive endoribonuclease) can target RNA. Endoribonucleases that can target RNA can include members of other CRISPR subfamilies such as Cas6 and Cas5.

[0102] As used herein, the term “specific” can refer to interaction of two molecules where one of the molecules through, for example chemical or physical means, specifically binds to the second molecule. Exemplary specific binding interactions can refer to antigen-antibody binding, avidin-biotin binding, carbohydrates and lectins, complementary nucleic acid sequences (e.g., hybridizing), complementary peptide sequences including those formed by recombinant methods, effector and receptor molecules, enzyme cofactors and enzymes, enzyme inhibitors and enzymes, and the like. “Non-specific” can refer to an interaction between two molecules that is not specific.

[0103] As used herein, “solid support” can generally refer to any insoluble, or partially soluble material. A solid support can refer to a test strip, a multi-well dish, and the like. The solid support can comprise a variety of substances (e.g., glass, polystyrene, polyvinyl chloride, polypropylene, polyethylene, polycarbonate, dextran, nylon, amylose, natural and modified celluloses, polyacrylamides, agaroses, and magnetite) and can be provided in a variety of forms, including agarose beads, polystyrene beads, latex beads, magnetic beads, colloid metal particles, glass and/or silicon chips and surfaces, nitrocellulose strips, nylon membranes, sheets, wells of reaction trays (e.g., multi-well plates), plastic tubes, etc. A solid support can be solid, semisolid, a bead, or a surface. The support can mobile in a solution or can be immobile. A solid support can be used to capture a polypeptide. A solid support can comprise a capture agent.

[0104] As used herein, “target nucleic acid” can generally refer to a nucleic acid to be used in the methods of the disclosure. A target nucleic acid can refer to a chromosomal sequence or an extrachromosomal sequence, (e.g. an episomal sequence, a minicircle sequence, a mitochondrial sequence, a chloroplast sequence, etc.). A target nucleic acid can be DNA. A target nucleic acid can be RNA. A target nucleic acid can herein be used interchangeably with “polynucleotide”, “nucleotide sequence”, and/or “target polynucleotide”. A target nucleic acid can be a nucleic acid sequence that may not be related to any other sequence in a nucleic acid sample by a single nucleotide substitution. A target nucleic acid can be a nucleic acid sequence that may not be related to any other sequence in a nucleic acid sample by a 2, 3, 4, 5, 6, 7, 8, 9, or 10 nucleotide substitutions. In some embodiments, the substitution cannot occur within 5, 10, 15, 20, 25, 30, or 35 nucleotides of the 5′ end of a target nucleic acid. In some embodiments, the substitution cannot occur within 5, 10, 15, 20, 25, 30, 35 nucleotides of the 3′ end of a target nucleic acid.

[0105] As used herein, “tracrRNA” can generally refer to a nucleic acid with at least about 5%, 10%, 20%, 30%, 40%, 50%, 60%, 70%, 80%, 90%, 100% sequence identity and/or sequence similarity to a wild type exemplary tracrRNA sequence (e.g., a tracrRNA from S. pyogenes (SEQ ID NO:433), SEQ ID NOs: 431-562). tracrRNA can refer to a nucleic acid with at most about 5%, 10%, 20%, 30%, 40%, 50%, 60%, 70%, 80%, 90%, 100% sequence identity and/or sequence similarity to a wild type exemplary tracrRNA sequence (e.g., a tracrRNA from S. pyogenes). tracrRNA can refer to a modified form of a tracrRNA that can comprise an nucleotide change such as a deletion, insertion, or substitution, variant, mutation, or chimera. A tracrRNA can refer to a nucleic acid that can be at least about 60% identical to a wild type exemplary tracrRNA (e.g., a tracrRNA from S. pyogenes) sequence over a stretch of at least 6 contiguous nucleotides. For example, a tracrRNA sequence can be at least about 60% identical, at least about 65% identical, at least about 70% identical, at least about 75% identical, at least about 80% identical, at least about 85% identical, at least about 90% identical, at least about 95% identical, at least about 98% identical, at least about 99% identical, or 100% identical, to a wild type exemplary tracrRNA (e.g., a tracrRNA from S. pyogenes) sequence over a stretch of at least 6 contiguous nucleotides. A tracrRNA can refer to a mid-tracrRNA. A tracrRNA can refer to a minimum tracrRNA sequence.

[0106] General Overview

[0107] The disclosure provides compositions and methods for increasing the targeting specificity of a complex comprising a nucleic acid-targeting nucleic acid and a site-directed polypeptide. A nucleic acid-targeting nucleic acid can be engineered at the 5′ end to comprise 1, 2, 3, or more additional nucleotides. In some instances, a nucleic acid-targeting nucleic acid is engineered to consist of 1 additional nucleotide. A nucleic acid-targeting nucleic acid can be engineered at the 5′ end to delete 1, 2, or 3 nucleotides. The location of 5′ engineering can be directly adjacent to the spacer. In other words, the 5′ spacer extension can be 1, 2, or 3 additional nucleotides. The 5′ engineered nucleic acid-targeting nucleic acid can retain activity at a target nucleic acid site, while decreasing off-target binding.

[0108] The disclosure provides for compositions and methods for altering the efficacy of a nucleic acid-targeting nucleic acid. A nucleic acid-targeting nucleic acid can be engineered at the 3′ end to delete one or two hairpins of the 3′ tracrRNA extension sequence (also known as, the hairpin region). The 3′ engineered nucleic acid-targeting nucleic acid can be chemically synthesized.

[0109] The disclosure provides for compositions and methods for generating a library of backbone variants of a nucleic acid-targeting nucleic acid (e.g., guide RNA variants). The variants in the library can be generated for any suitable region or sequence of the nucleic acid-targeting nucleic acid (FIGS. 3A and B), for example, in the 5′ spacer extension, spacer, lower stem, upper stem, bulge, nexus, loop, hairpin regions, or any combination thereof. The variants can comprise any suitable modifications of the residues, for example, deletion, insertion, substitution, variant, mutation, fusion, chimera, or any combination thereof. Modifications to nucleotides can include synthetic nucleotides, additional nucleotides, capped nucleotides, deoxyribonucleotides, or any combination thereof.

[0110] The variants in the library can be screened for characteristics such as binding efficacy, cleavage efficacy, and homologous recombination efficacy.

[0111] CRISPR Systems

[0112] A CRISPR (Clustered Regularly Interspaced Short Palindromic Repeats) can be a genomic locus found in the genomes of many prokaryotes (e.g., bacteria and archaea). CRISPR loci can provide resistance to foreign invaders (e.g, virus, phage) in prokaryotes. In this way, the CRISPR system can be thought to function as a type of immune system to help defend prokaryotes against foreign invaders. There can be three stages of CRISPR locus function: integration of new sequences into the locus, biogenesis of CRISPR RNA (crRNA), and silencing of foreign invader nucleic acid. There can be four types of CRISPR systems (e.g., Type I, Type II, Type III, TypeU).

[0113] A CRISPR locus can include a number of short repeating sequences referred to as “repeats.” Repeats can form hairpin structures and/or repeats can be unstructured single-stranded sequences. The repeats can occur in clusters. Repeats sequences can frequently diverge between species. Repeats can be regularly interspaced with unique intervening sequences referred to as “spacers,” resulting in a repeat-spacer-repeat locus architecture. Spacers can be identical to or have high homology with known foreign invader sequences. A spacer-repeat unit can encode a CRISPR RNA (crRNA). A crRNA can refer to the mature form of the spacer-repeat unit. A spacer can comprise a “seed” sequence that can be involved in targeting a target nucleic acid (e.g., possibly as a surveillance mechanism against foreign nucleic acid). A seed sequence can be located at the 5′ or 3′ end of the crRNA.

[0114] A CRISPR locus can comprise polynucleotide sequences encoding for CRISPR Associated Genes (Cas) genes. Cas genes can be involved in the biogenesis and/or the interference stages of crRNA function. Cas genes can display extreme sequence (e.g., primary sequence) divergence between species and homologues. For example, Cas1 homologues can comprise less than 10% primary sequence identity between homologues. Some Cas genes can comprise homologous secondary and/or tertiary structures. For example, despite extreme sequence divergence, many members of the Cash family of CRISPR proteins comprise a N-terminal ferredoxin-like fold. Cas genes can be named according to the organism from which they are derived. For example, Cas genes in Staphylococcus epidermidis can be referred to as Csm-type, Cas genes in Streptococcus thermophilus can be referred to as Csn-type, and Cas genes in Pyrococcus furiosus can be referred to as Cmr-type.

[0115] Integration

[0116] The integration stage of CRISPR system can refer to the ability of the CRISPR locus to integrate new spacers into the crRNA array upon being infected by a foreign invader. Acquisition of the foreign invader spacers can help confer immunity to subsequent attacks by the same foreign invader. Integration can occur at the leader end of the CRISPR locus. Cas proteins (e.g., Cas1 and Cas2) can be involved in integration of new spacer sequences. Integration can proceed similarly for some types of CRISPR systems (e.g., Type I-III).

[0117] Biogenesis

[0118] Mature crRNAs can be processed from a longer polycistronic CRISPR locus transcript (i.e., pre-crRNA array). A pre-crRNA array can comprise a plurality of crRNAs. The repeats in the pre-crRNA array can be recognized by a Cas genes. Cas genes can bind to the repeats and cleave the repeats. This action can liberate the plurality of crRNAs. crRNAs can be subjected to further events to produce the mature crRNA form such as trimming (e.g., with an exonuclese). A crRNA may comprise all, some, or none of the CRISPR repeat sequence.

[0119] Interference

[0120] Interference can refer to the stage in the CRISPR system that is functionally responsible for combating infection by a foreign invader. CRISPR interference can follow a similar mechanism to RNA interference (RNAi (e.g., wherein a target RNA is targeted (e.g., hybridized) by a short interfering RNA (siRNA)), which can result in target RNA degradation and/or destabilization. CRISPR systems can perform interference of a target nucleic acid by coupling crRNAs and Cas genes, thereby forming CRISPR ribonucleoproteins (crRNPs). crRNA of the crRNP can guide the crRNP to foreign invader nucleic acid, (e.g., by recognizing the foreign invader nucleic acid through hybridization). Hybridized target foreign invader nucleic acid-crRNA units can be subjected to cleavage by Cas proteins. Target nucleic acid interference may require a spacer adjacent motif (PAM) in a target nucleic acid.

[0121] Types of CRISPR Systems

[0122] There can be four types of CRISPR systems: Type I, Type II, Type III, and Type U. More than one CRISPR type system can be found in an organism. CRISPR systems can be complementary to each other, and/or can lend functional units in trans to facilitate CRISPR locus processing.

[0123] Type I CRISPR Systems

[0124] crRNA biogenesis in Type I CRISPR systems can comprise endoribonuclease cleavage of repeats in the pre-crRNA array, which can result in a plurality of crRNAs. crRNAs of Type I systems may not be subjected to crRNA trimming. A crRNA can be processed from a pre-crRNA array by a multi-protein complex called CASCADE (originating from CRISPR-associated complex for antiviral defense). CASCADE can comprise protein subunits (e.g, CasA-CasE). Some of the subunits can be members of the Repeat Associated Mysterious Protein (RAMP) superfamily (e.g., Cas5 and Cas6 families). The CASCADE-crRNA complex (i.e., interference complex) can recognize target nucleic acid through hybridization of the crRNA with the target nucleic acid. The CASCADE interference complex can recruit the Cas3 helicase/nuclease which can act in trans to facilitate cleavage of target nucleic acid. The Cas3 nuclease can cleave target nucleic acid (e.g., with its HD nuclease domain). Target nucleic acid in a Type I CRISPR system can comprise a PAM. Target nucleic acid in a Type I CRISPR system can be DNA.

[0125] Type I systems can be further subdivided by their species of origin. Type I systems can comprise: Types IA (Aeropyrum pernix or CASS5); IB (Thermotoga neapolitana-Haloarcula marismortui or CASS7); IC (Desulfovibrio vulgaris or CASS1); ID; IE (Escherichia coli or CASS2); and IF (Yersinia pestis or CASS3) subfamilies.

[0126] Type II CRISPR Systems

[0127] crRNA biogenesis in a Type II CRISPR system can comprise a trans-activating CRISPR RNA (tracrRNA). A tracrRNA can be modified by endogenous RNaseIII. The tracrRNA of the complex can hybridize to a crRNA repeat in the pre-crRNA array. Endogenous RnaseIII can be recruited to cleave the pre-crRNA. Cleaved crRNAs can be subjected to exoribonuclease trimming to produce the mature crRNA form (e.g., 5′ trimming). The tracrRNA can remain hybridized to the crRNA. The tracrRNA and the crRNA can associate with a site-directed polypeptide (e.g., Cas9). The crRNA of the crRNA-tracrRNA-Cas9 complex can guide the complex to a target nucleic acid to which the crRNA can hybridize. Hybridization of the crRNA to the target nucleic acid can activate Cas9 for target nucleic acid cleavage. Target nucleic acid in a Type II CRISPR system can comprise a PAM. In some embodiments, a PAM is essential to facilitate binding of a site-directed polypeptide (e.g., Cas9) to a target nucleic acid. Type II systems can be further subdivided into II-A (Nmeni or CASS4) and II-B (Nmeni or CASS4). CRISPR systems are the subject of active research and new classifications and nomenclatures appear in the art from time-to-time. Classification systems listed here will be understood by one in the art to change from time-to-time and to define related sequences more thoroughly.

[0128] Type III CRISPR Systems

[0129] crRNA biogenesis in Type III CRISPR systems can comprise a step of endoribonuclease cleavage of repeats in the pre-crRNA array, which can result in a plurality of crRNAs. Repeats in the Type III CRISPR system can be unstructured single-stranded regions. Repeats can be recognized and cleaved by a member of the RAMP superfamily of endoribonucleases (e.g., Cas6). crRNAs of Type III (e.g., Type III-B) systems may be subjected to crRNA trimming (e.g., 3′ trimming). Type III systems can comprise a polymerase-like protein (e.g., Cas10). Cas10 can comprise a domain homologous to a palm domain.

[0130] Type III systems can process pre-crRNA with a complex comprising a plurality of RAMP superfamily member proteins and one or more CRISPR polymerase-like proteins. Type III systems can be divided into III-A and III-B. An interference complex of the Type III-A system (i.e., Csm complex) can target plasmid nucleic acid. Cleavage of the plasmid nucleic acid can occur with the HD nuclease domain of a polymerase-like protein in the complex. An interference complex of the Type III-B system (i.e., Cmr complex) can target RNA.

[0131] Type U CRISPR Systems

[0132] Type U CRISPR systems may not comprise the signature genes of either of the Type I-III CRISPR systems (e.g., Cas3, Cas9, Cas6, Cas1, Cas2). Examples of Type U CRISPR Cas genes can include, but are not limited to, Csf1, Csf2, Csf3, Csf4. Type U Cas genes may be very distant homologues of Type I-III Cas genes. For example, Csf3 may be highly diverged but functionally similar to Cas5 family members. A Type U system may function complementarily in trans with a Type I-III system. In some instances, Type U systems may not be associated with processing CRISPR arrays. Type U systems may represent an alternative foreign invader defense system.

[0133] RAMP Superfamily

[0134] Repeat Associated Mysterious Proteins (RAMP proteins) can be characterized by a protein fold comprising a βαββαβ [beta-alpha-beta-beta-alpha-beta] motif of β-strands (β) and α-helices (α). A RAMP protein can comprise an RNA recognition motif (RRM) (which can comprise a ferredoxin or ferredoxin-like fold). RAMP proteins can comprise an N-terminal RRM. The C-terminal domain of RAMP proteins can vary, but can also comprise an RRM. RAMP family members can recognize structured and/or unstructured nucleic acid. RAMP family members can recognize single-stranded and/or double-stranded nucleic acid. RAMP proteins can be involved in the biogenesis and/or the interference stage of CRISPR Type I and Type III systems. RAMP superfamily members can comprise members of the Cas7, Cas6, and Cas5 families. RAMP superfamily members can be endoribonucleases.

[0135] RRM domains in the RAMP superfamily can be extremely divergent. RRM domains can comprise at least about 5%, at least about 10%, at least about 15%, at least about 20%, at least about 25%, at least about 30%, at least about 35%, at least about 40%, at least about 45%, at least about 50%, at least about 55%, at least about 60%, at least about 65%, at least about 70%, at least about 75%, at least about 80%, at least about 85%, at least about 90%, at least about 95%, or 100% sequence or structural homology to a wild type exemplary RRM domain (e.g., an RRM domain from Cas7). RRM domains can comprise at most about 5%, at most about 10%, at most about 15%, at most about 20%, at most about 25%, at most about 30%, at most about 35%, at most about 40%, at most about 45%, at most about 50%, at most about 55%, at most about 60%, at most about 65%, at most about 70%, at most about 75%, at most about 80%, at most about 85%, at most about 90%, at most about 95%, or 100% sequence or structural homology to a wild type exemplary RRM domain (e.g., an RRM domain from Cas7).

[0136] Cas7 Family

[0137] Cas7 family members can be a subclass of RAMP family proteins. Cas7 family proteins can be categorized in Type I CRISPR systems. Cas7 family members may not comprise a glycine rich loop that is familiar to some RAMP family members. Cas7 family members can comprise one RRM domain. Cas7 family members can include, but are not limited to, Cas7 (COG1857), Cas7 (COG3649), Cas7 (CT1975), Csy3, Csm3, Cmr6, Csm5, Cmr4, Cmr1, Csf2, and Csc2.

[0138] Cas6 Family

[0139] The Cas6 family can be a RAMP subfamily. Cas6 family members can comprise two RNA recognition motif (RRM)-like domains. A Cas6 family member (e.g., Cas6f) can comprise a N-terminal RRM domain and a distinct C-terminal domain that may show weak sequence similarity or structural homology to an RRM domain. Cas6 family members can comprise a catalytic histidine that may be involved in endoribonuclease activity. A comparable motif can be found in Cas5 and Cas7 RAMP families. Cas6 family members can include, but are not limited to, Cas6, Cas6e, Cas6f (e.g., Csy4).

[0140] Cas5 Family

[0141] The Cas5 family can be a RAMP subfamily. The Cas5 family can be divided into two subgroups: one subgroup that can comprise two RRM domains, and one subgroup that can comprise one RRM domain. Cas5 family members can include, but are not limited to, Csm4, Csx10, Cmr3, Cas5, Cas5(BH0337), Csy2, Csc1, Csf3.

[0142] Cas Genes

[0143] Exemplary CRISPR Cas genes can include Cas1, Cas2, Cas3′ (Cas3-prime), Cas3″ (Cas3-double prime), Cas4, Cas5, Cas6, Cas6e (formerly referred to as CasE, Cse3), Cas6f (i.e., Csy4), Cas7, Cas8a1, Cas8a2, Cas8b, Cas8c, Cas9, Cas10, Cas10d, Csy1, Csy2, Csy3, Cse1, Cse2, Csc1, Csc2, Csa5, Csn2, Csm2, Csm3, Csm4, Csm5, Csm6, Cmr1, Cmr3, Cmr4, Cmr5, Cmr6, Csb1, Csb2, Csb3, Csx17, Csx14, Csx10, Csx16, CsaX, Csx3, Csx1, Csx15, Csf1, Csf2, Csf3, Csf4. Table 1 provides an exemplary categorization of CRISPR Cas genes by CRISPR system type.

[0144] The CRISPR-Cas gene naming system has undergone extensive rewriting since the Cas genes were discovered. For the purposes of this application, Cas gene names used herein are based on the naming system outlined in Makarova et al. Evolution and classification of the CRISPR-Cas systems. Nature Reviews Microbiology. 2011 June; 9(6): 467-477. Doi:10.1038/nrmicro2577.

TABLE 1
Exemplary classification of CRISPR Cas genes by CRISPR Type

| System type | |
|---|---|
| or subtype | Gene Name |
| Type I | cas1, cas2, cas3′ |
| Type II | cas1, cas2, cas9 |
| Type III | cas1, cas2, cas10 |
| Subtype I-A | cas3″, cas4, cas5, |
| | cas6, cas7, cas8a1, |
| | cas8a2, csa5 |
| Subtype I-B | cas3″, cas4, cas5, |
| | cas6, cas7, cas8b |
| Subtype I-C | cas4, cas5, cas7, |
| | cas8c |
| Subtype I-D | cas4, cas6, cas10d, |
| | csc1, csc2 |
| Subtype I-E | cas5, cas6e, cas7, |
| | cse1, cse2 |
| Subtype I-F | cas6f, csy1, csy2, |
| | csy3 |
| Subtype II-A | csn2 |
| Subtype II-B | cas4 |
| Subtype III-A | cas6, csm2, csm3, |
| | csm4, csm5, csm6 |
| Subtype III-B | cas6, cmr1, cmr3, |
| | cmr4, cmr5, cmx6 |
| Subtype I-U | csb1, csb2, csb3, |
| | csx17, csx14, csx10 |
| Subtype III-U | csx16, csaX, csx3, |
| | csx1 |
| Unknown | csx15 |
| Type U | csf1, csf2, csf3, |
| | csf4 |

[0145] Site-Directed Polypeptides

[0146] A site-directed polypeptide can be a polypeptide that can bind to a target nucleic acid. A site-directed polypeptide can be a nuclease.

[0147] A site-directed polypeptide can comprise a nucleic acid-binding domain. The nucleic acid-binding domain can comprise a region that contacts a nucleic acid. A nucleic acid-binding domain can comprise a nucleic acid. A nucleic acid-binding domain can comprise a proteinaceous material. A nucleic acid-binding domain can comprise nucleic acid and a proteinaceous material. A nucleic acid-binding domain can comprise RNA. There can be a single nucleic acid-binding domain. Examples of nucleic acid-binding domains can include, but are not limited to, a helix-turn-helix domain, a zinc finger domain, a leucine zipper (bZIP) domain, a winged helix domain, a winged helix turn helix domain, a helix-loop-helix domain, a HMG-box domain, a Wor3 domain, an immunoglobulin domain, a B3 domain, a TALE domain, a RNA-recognition motif domain, a double-stranded RNA-binding motif domain, a double-stranded nucleic acid binding domain, a single-stranded nucleic acid binding domains, a KH domain, a PUF domain, a RGG box domain, a DEAD/DEAH box domain, a PAZ domain, a Piwi domain, and a cold-shock domain.

[0148] A nucleic acid-binding domain can be a domain of an Argonaute protein. An Argonaute protein can be a eukaryotic Argonaute or a prokaryotic Argonaute. An Argonaute protein can bind RNA, DNA, or both RNA and DNA. An Argonaute protein can cleaved RNA, or DNA, or both RNA and DNA. In some instances, an Argonaute protein binds a DNA and cleaves a target DNA.

[0149] In some instances, two or more nucleic acid-binding domains can be linked together. Linking a plurality of nucleic acid-binding domains together can provide increased polynucleotide targeting specificity. Two or more nucleic acid-binding domains can be linked via one or more linkers. The linker can be a flexible linker. Linkers can comprise 1, 2, 3, 4, 5, 6, 7, 8, 9, 10, 11, 12, 13, 14, 15, 16, 17, 18, 19, 20, 21, 22, 23, 24, 25, 30, 35, 40 or more amino acids in length. Linkers can comprise at least 5%, 10%, 15%, 20%, 25%, 30%, 35%, 40%, 45%, 50%, 55%, 60%, 65%, 70%, 75%, 80%, 85%, 90%, 95%, or 100% glycine content. Linkers can comprise at most 5%, 10%, 15%, 20%, 25%, 30%, 35%, 40%, 45%, 50%, 55%, 60%, 65%, 70%, 75%, 80%, 85%, 90%, 95%, or 100% glycine content. Linkers can comprise at least 5%, 10%, 15%, 20%, 25%, 30%, 35%, 40%, 45%, 50%, 55%, 60%, 65%, 70%, 75%, 80%, 85%, 90%, 95%, or 100% serine content. Linkers can comprise at most 5%, 10%, 15%, 20%, 25%, 30%, 35%, 40%, 45%, 50%, 55%, 60%, 65%, 70%, 75%, 80%, 85%, 90%, 95%, or 100% serine content.

[0150] Nucleic acid-binding domains can bind to nucleic acid sequences. Nucleic acid binding domains can bind to nucleic acids through hybridization. Nucleic acid-binding domains can be engineered (e.g. engineered to hybridize to a sequence in a genome). A nucleic acid-binding domain can be engineered by molecular cloning techniques (e.g., directed evolution, site-specific mutation, and rational mutagenesis).

[0151] A site-directed polypeptide can comprise a nucleic acid-cleaving domain. The nucleic acid-cleaving domain can be a nucleic acid-cleaving domain from any nucleic acid-cleaving protein. The nucleic acid-cleaving domain can originate from a nuclease. Suitable nucleic acid-cleaving domains include the nucleic acid-cleaving domain of endonucleases (e.g., AP endonuclease, RecBCD enonuclease, T7 endonuclease, T4 endonuclease IV, Bal 31 endonuclease, EndonucleaseI (endo I), Micrococcal nuclease, Endonuclease II (endo VI, exo III)), exonucleases, restriction nucleases, endoribonucleases, exoribonucleases, RNases (e.g., RNAse I, II, or III). In some instances, the nucleic acid-cleaving domain can originate from the FokI endonuclease. A site-directed polypeptide can comprise a plurality of nucleic acid-cleaving domains. Nucleic acid-cleaving domains can be linked together. Two or more nucleic acid-cleaving domains can be linked via a linker. In some embodiments, the linker can be a flexible linker Linkers can comprise 1, 2, 3, 4, 5, 6, 7, 8, 9, 10, 11, 12, 13, 14, 15, 16, 17, 18, 19, 20, 21, 22, 23, 24, 25, 30, 35, 40 or more amino acids in length. In some embodiments, a site-directed polypeptide can comprise the plurality of nucleic acid-cleaving domains.

[0152] A site-directed polypeptide (e.g., Cas9, Argonaute) can comprise two or more nuclease domains. Cas9 can comprise a HNH or FINE-like nuclease domain and/or a RuvC or RuvC-like nuclease domain. HNH or FINE-like domains can comprise a McrA-like fold. HNH or FINE-like domains can comprise two antiparallel β-strands and an α-helix. HNH or FINE-like domains can comprise a metal binding site (e.g., divalent cation binding site). HNH or HNH-like domains can cleave one strand of a target nucleic acid (e.g., complementary strand of the crRNA targeted strand). Proteins that comprise an HNH or HNH-like domain can include endonucleases, clicins, restriction endonucleases, transposases, and DNA packaging factors.

[0153] RuvC or RuvC-like domains can comprise an RNaseH or RNaseH-like fold. RuvC/RNaseH domains can be involved in a diverse set of nucleic acid-based functions including acting on both RNA and DNA. The RNaseH domain can comprise 5 β-strands surrounded by a plurality of α-helices. RuvC/RNaseH or RuvC/RNaseH-like domains can comprise a metal binding site (e.g., divalent cation binding site). RuvC/RNaseH or RuvC/RNaseH-like domains can cleave one strand of a target nucleic acid (e.g., non-complementary strand of the crRNA targeted strand). Proteins that comprise a RuvC, RuvC-like, or RNaseH-like domain can include RNaseH, RuvC, DNA transposases, retroviral integrases, and Argonaut proteins).

[0154] The site-directed polypeptide can be an endoribonuclease. The site-directed polypeptide can be an enzymatically inactive site-directed polypeptide. The site-directed polypeptide can be a conditionally enzymatically inactive site-directed polypeptide.

[0155] Site-directed polypeptides can introduce double-stranded breaks or single-stranded breaks in nucleic acid, (e.g. genomic DNA). The double-stranded break can stimulate a cell's endogenous DNA-repair pathways (e.g. homologous recombination and non-homologous end joining (NHEJ) or alternative non-homologous end joining (A-NHEJ)). NHEJ can repair cleaved target nucleic acid without the need for a homologous template. This can result in deletions of the target nucleic acid. Homologous recombination (HR) can occur with a homologous template. The homologous template can comprise sequences that are homologous to sequences flanking the target nucleic acid cleavage site. After a target nucleic acid is cleaved by a site-directed polypeptide the site of cleavage can be destroyed (e.g., the site may not be accessible for another round of cleavage with the original nucleic acid-targeting nucleic acid and site-directed polypeptide).

[0156] In some cases, homologous recombination can insert an exogenous polynucleotide sequence into the target nucleic acid cleavage site. An exogenous polynucleotide sequence can be called a donor polynucleotide. In some instances of the methods of the disclosure the donor polynucleotide, a portion of the donor polynucleotide, a copy of the donor polynucleotide, or a portion of a copy of the donor polynucleotide can be inserted into the target nucleic acid cleavage site. A donor polynucleotide can be an exogenous polynucleotide sequence. A donor polynucleotide can be a sequence that does not naturally occur at the target nucleic acid cleavage site. A vector can comprise a donor polynucleotide. The modifications of the target DNA due to NHEJ and/or HR can lead to, for example, mutations, deletions, alterations, integrations, gene correction, gene replacement, gene tagging, transgene insertion, nucleotide deletion, gene disruption, and/or gene mutation. The process of integrating non-native nucleic acid into genomic DNA can be referred to as genome engineering.

[0157] In some cases, the site-directed polypeptide can comprise an amino acid sequence having at most 10%, at most 15%, at most 20%, at most 30%, at most 40%, at most 50%, at most 60%, at most 70%, at most 75%, at most 80%, at most 85%, at most 90%, at most 95%, at most 99%, or 100%, amino acid sequence identity to a wild type exemplary site-directed polypeptide (e.g., Cas9 from S. pyogenes).

[0158] In some cases, the site-directed polypeptide can comprise an amino acid sequence having at least 10%, at least 15%, at least 20%, at least 30%, at least 40%, at least 50%, at least 60%, at least 70%, at least 75%, at least 80%, at least 85%, at least 90%, at least 95%, at least 99%, or 100%, amino acid sequence identity to a wild type exemplary site-directed polypeptide (e.g., Cas9 from S. pyogenes).

[0159] In some cases, the site-directed polypeptide can comprise an amino acid sequence having at most 10%, at most 15%, at most 20%, at most 30%, at most 40%, at most 50%, at most 60%, at most 70%, at most 75%, at most 80%, at most 85%, at most 90%, at most 95%, at most 99%, or 100%, amino acid sequence identity to the nuclease domain of a wild type exemplary site-directed polypeptide (e.g., Cas9 from S. pyogenes).

[0160] A site-directed polypeptide can comprise at least 70, 75, 80, 85, 90, 95, 97, 99, or 100% identity to wild-type site-directed polypeptide (e.g., Cas9 from S. pyogenes) over 10 contiguous amino acids. A site-directed polypeptide can comprise at most 70, 75, 80, 85, 90, 95, 97, 99, or 100% identity to wild-type site-directed polypeptide (e.g., Cas9 from S. pyogenes) over 10 contiguous amino acids. A site-directed polypeptide can comprise at least 70, 75, 80, 85, 90, 95, 97, 99, or 100% identity to a wild-type site-directed polypeptide (e.g., Cas9 from S. pyogenes) over 10 contiguous amino acids in a HNH nuclease domain of the site-directed polypeptide. A site-directed polypeptide can comprise at most 70, 75, 80, 85, 90, 95, 97, 99, or 100% identity to a wild-type site-directed polypeptide (e.g., Cas9 from S. pyogenes) over 10 contiguous amino acids in a HNH nuclease domain of the site-directed polypeptide. A site-directed polypeptide can comprise at least 70, 75, 80, 85, 90, 95, 97, 99, or 100% identity to a wild-type site-directed polypeptide (e.g., Cas9 from S. pyogenes) over 10 contiguous amino acids in a RuvC nuclease domain of the site-directed polypeptide. A site-directed polypeptide can comprise at most 70, 75, 80, 85, 90, 95, 97, 99, or 100% identity to a wild-type site-directed polypeptide (e.g., Cas9 from S. pyogenes) over 10 contiguous amino acids in a RuvC nuclease domain of the site-directed polypeptide.

[0161] In some cases, the site-directed polypeptide can comprise an amino acid sequence having at least 10%, at least 15%, at least 20%, at least 30%, at least 40%, at least 50%, at least 60%, at least 70%, at least 75%, at least 80%, at least 85%, at least 90%, at least 95%, at least 99%, or 100%, amino acid sequence identity to the nuclease domain of a wild type exemplary site-directed polypeptide (e.g., Cas9 from S. pyogenes).

[0162] The site-directed polypeptide can comprise a modified form of a wild type exemplary site-directed polypeptide. The modified form of the wild type exemplary site-directed polypeptide can comprise an amino acid change (e.g., deletion, insertion, or substitution) that reduces the nucleic acid-cleaving activity of the site-directed polypeptide. For example, the modified form of the wild type exemplary site-directed polypeptide can have less than less than 90%, less than 80%, less than 70%, less than 60%, less than 50%, less than 40%, less than 30%, less than 20%, less than 10%, less than 5%, or less than 1% of the nucleic acid-cleaving activity of the wild-type exemplary site-directed polypeptide (e.g., Cas9 from S. pyogenes). The modified form of the site-directed polypeptide can have no substantial nucleic acid-cleaving activity. When a site-directed polypeptide is a modified form that has no substantial nucleic acid-cleaving activity, it can be referred to as “enzymatically inactive.”

[0163] The modified form of the wild type exemplary site-directed polypeptide can have more than 90%, more than 80%, more than 70%, more than 60%, more than 50%, more than 40%, more than 30%, more than 20%, more than 10%, more than 5%, or more than 1% of the nucleic acid-cleaving activity of the wild-type exemplary site-directed polypeptide (e.g., Cas9 from S. pyogenes).

[0164] The modified form of the site-directed polypeptide can comprise a mutation. The modified form of the site-directed polypeptide can comprise a mutation such that it can induce a single stranded break (SSB) on a target nucleic acid (e.g., by cutting only one of the sugar-phosphate backbones of the target nucleic acid). The mutation can result in less than 90%, less than 80%, less than 70%, less than 60%, less than 50%, less than 40%, less than 30%, less than 20%, less than 10%, less than 5%, or less than 1% of the nucleic acid-cleaving activity in one or more of the plurality of nucleic acid-cleaving domains of the wild-type site directed polypeptide (e.g., Cas9 from S. pyogenes). The mutation can result in one or more of the plurality of nucleic acid-cleaving domains retaining the ability to cleave the complementary strand of the target nucleic acid but reducing its ability to cleave the non-complementary strand of the target nucleic acid. The mutation can result in one or more of the plurality of nucleic acid-cleaving domains retaining the ability to cleave the non-complementary strand of the target nucleic acid but reducing its ability to cleave the complementary strand of the target nucleic acid. For example, residues in the wild type exemplary S. pyogenes Cas9 polypeptide such as Asp10, His840, Asn854 and Asn856 can be mutated to inactivate one or more of the plurality of nucleic acid-cleaving domains (e.g., nuclease domains). The residues to be mutated can correspond to residues Asp10, His840, Asn854 and Asn856 in the wild type exemplary S. pyogenes Cas9 polypeptide (e.g., as determined by sequence and/or structural alignment). Non-limiting examples of mutations can include D10A, H840A, N854A or N856A. One skilled in the art will recognize that mutations other than alanine substitutions are suitable.

[0165] A D10A mutation can be combined with one or more of H840A, N854A, or N856A mutations to produce a site-directed polypeptide substantially lacking DNA cleavage activity. A H840A mutation can be combined with one or more of D10A, N854A, or N856A mutations to produce a site-directed polypeptide substantially lacking DNA cleavage activity. A N854A mutation can be combined with one or more of H840A, D10A, or N856A mutations to produce a site-directed polypeptide substantially lacking DNA cleavage activity. A N856A mutation can be combined with one or more of H840A, N854A, or D10A mutations to produce a site-directed polypeptide substantially lacking DNA cleavage activity. Site-directed polypeptides that comprise one substantially inactive nuclease domain can be referred to as nickases.

[0166] Mutations of the disclosure can be produced by site-directed mutation. Mutations can include substitutions, additions, and deletions, or any combination thereof. In some instances, the mutation converts the mutated amino acid to alanine. In some instances, the mutation converts the mutated amino acid to another amino acid (e.g., glycine, serine, threonine, cysteine, valine, leucine, isoleucine, methionine, proline, phenylalanine, tyrosine, tryptophan, aspartic acid, glutamic acid, asparagines, glutamine, histidine, lysine, or arginine). The mutation can convert the mutated amino acid to a non-natural amino acid (e.g., selenomethionine). The mutation can convert the mutated amino acid to amino acid mimics (e.g., phosphomimics). The mutation can be a conservative mutation. For example, the mutation can convert the mutated amino acid to amino acids that resemble the size, shape, charge, polarity, conformation, and/or rotamers of the mutated amino acids (e.g., cysteine/serine mutation, lysine/asparagine mutation, histidine/phenylalanine mutation).

[0167] In some instances, the site-directed polypeptide (e.g., variant, mutated, enzymatically inactive and/or conditionally enzymatically inactive site-directed polypeptide) can target nucleic acid. The site-directed polypeptide (e.g., variant, mutated, enzymatically inactive and/or conditionally enzymatically inactive endoribonuclease) can target RNA. Site-directed polypeptides that can target RNA can include members of other CRISPR subfamilies such as Cas6 and Cas5.

[0168] The site-directed polypeptide can comprise one or more non-native sequences (e.g., a fusion).

[0169] Codon-Optimization

[0170] A polynucleotide encoding a site-directed polypeptide and/or an endoribonuclease can be codon-optimized. This type of optimization can entail the mutation of foreign-derived (e.g., recombinant) DNA to mimic the codon preferences of the intended host organism or cell while encoding the same protein. Thus, the codons can be changed, but the encoded protein remains unchanged. For example, if the intended target cell was a human cell, a human codon-optimized polynucleotide Cas9 could be used for producing a suitable site-directed polypeptide. As another non-limiting example, if the intended host cell were a mouse cell, then a mouse codon-optimized polynucleotide encoding Cas9 could be a suitable site-directed polypeptide. A polynucleotide encoding a site-directed polypeptide can be codon optimized for many host cells of interest. A host cell can be a cell from any organism (e.g. a bacterial cell, an archaeal cell, a cell of a single-cell eukaryotic organism, a plant cell, an algal cell, e.g., Botryococcus braunii, Chlamydomonas reinhardtii, Nannochloropsis gaditana, Chlorella pyrenoidosa, Sargassum patens C. Agardh, and the like, a fungal cell (e.g., a yeast cell), an animal cell, a cell from an invertebrate animal (e.g. fruit fly, cnidarian, echinoderm, nematode, etc.), a cell from a vertebrate animal (e.g., fish, amphibian, reptile, bird, mammal), a cell from a mammal (e.g., a pig, a cow, a goat, a sheep, a rodent, a rat, a mouse, a non-human primate, a human, etc.), etc. Codon optimization may not be required. In some instances, codon optimization can be preferable.

[0171] Nucleic Acid-Targeting Nucleic Acid

[0172] The present disclosure provides for a nucleic acid-targeting nucleic acid that can direct the activities of an associated polypeptide (e.g., a site-directed polypeptide) to a specific target sequence within a target nucleic acid. The nucleic acid-targeting nucleic acid can comprise nucleotides. The nucleic acid-targeting nucleic acid can be RNA. A nucleic acid-targeting nucleic acid can comprise a single guide nucleic acid-targeting nucleic acid. A nucleic acid-targeting nucleic acid can comprise a crRNA hybridized to a tracrRNA. An exemplary single guide nucleic acid-targeting nucleic acid is depicted in FIG. 1A. The spacer extension 105 and the tracrRNA extension 135 can comprise elements that can contribute additional functionality (e.g., stability) to the nucleic acid-targeting nucleic acid. In some embodiments the spacer extension 105 and the tracrRNA extension 135 are optional. A spacer sequence 110 can comprise a sequence that can hybridize to a target nucleic acid sequence. The spacer sequence 110 can be a variable portion of the nucleic acid-targeting nucleic acid. The sequence of the spacer sequence 110 can be engineered to hybridize to the target nucleic acid sequence. The CRISPR repeat 115 (i.e. referred to in this exemplary embodiment as a minimum CRISPR repeat) can comprise nucleotides that can hybridize to a tracrRNA sequence 125 (i.e. referred to in this exemplary embodiment as a minimum tracrRNA sequence). The minimum CRISPR repeat 115 and the minimum tracrRNA sequence 125 can interact, the interacting molecules comprising a base-paired, double-stranded structure. Together, the minimum CRISPR repeat 115 and the minimum tracrRNA sequence 125 form a stem loop duplex structure and can facilitate binding to the site-directed polypeptide. The minimum CRISPR repeat 115 and the minimum tracrRNA sequence 125 can be linked together to form a hairpin structure through the single guide connector 120. The 3′ tracrRNA sequence 130 can comprise a protospacer adjacent motif recognition sequence. The 3′ tracrRNA sequence 130 can be identical or similar to part of a tracrRNA sequence. In some embodiments, the 3′ tracrRNA sequence 130 can comprise one or more hairpins.

[0173] In some embodiments, a nucleic acid-targeting nucleic acid can comprise a single guide nucleic acid-targeting nucleic acid as depicted in FIG. 1B. A nucleic acid-targeting nucleic acid can comprise a spacer sequence 140. A spacer sequence 140 can comprise a sequence that can hybridize to the target nucleic acid sequence. The spacer sequence 140 can be a variable portion of the nucleic acid-targeting nucleic acid. The spacer sequence 140 can be 5′ of a first duplex 145. The first duplex 145 comprises a region of hybridization between a minimum CRISPR repeat 146 and minimum tracrRNA sequence 147. The first duplex 145 can be interrupted by a bulge 150. The bulge 150 can comprise unpaired nucleotides. The bulge 150 can facilitate the recruitment of a site-directed polypeptide to the nucleic acid-targeting nucleic acid. The bulge 150 can be followed by a first stem 155. The first stem 155 comprises a linker sequence linking the minimum CRISPR repeat 146 and the minimum tracrRNA sequence 147. The last paired nucleotide at the 3′ end of the first duplex 145 can be connected to a second linker sequence 160. The second linker 160 can comprise a nexus. The second linker 160 can link the first duplex 145 to a mid-tracrRNA 165. The mid-tracrRNA 165 can, in some embodiments, comprise one or more hairpin regions. For example the mid-tracrRNA 165 can comprise a second stem 170 and a third stem 175.

[0174] In some embodiments, the nucleic acid-targeting nucleic acid can comprise a double guide nucleic acid structure. FIG. 2 depicts an exemplary double guide nucleic acid-targeting nucleic acid structure. Similar to the single guide nucleic acid structure of FIG. 1, the double guide nucleic acid structure can comprise a spacer extension 205, a spacer 210, a minimum CRISPR repeat 215, a minimum tracrRNA sequence 230, a 3′ tracrRNA sequence 235, and a tracrRNA extension 240. However, a double guide nucleic acid-targeting nucleic acid may not comprise the single guide connector 120. Instead the minimum CRISPR repeat sequence 215 can comprise a 3′ CRISPR repeat sequence 220 which can be similar or identical to part of a CRISPR repeat. Similarly, the minimum tracrRNA sequence 230 can comprise a 5′ tracrRNA sequence 225 which can be similar or identical to part of a tracrRNA. The double guide RNAs can hybridize together via the minimum CRISPR repeat 215 and the minimum tracrRNA sequence 230.

[0175] In some embodiments, the first segment (i.e., nucleic acid-targeting segment) can comprise the spacer extension (e.g., 105/205) and the spacer (e.g., 110/210). The nucleic acid-targeting nucleic acid can guide the bound polypeptide to a specific nucleotide sequence within target nucleic acid via the above mentioned nucleic acid-targeting segment.

[0176] In some embodiments, the second segment (i.e., protein binding segment) can comprise the minimum CRISPR repeat (e.g., 115/215), the minimum tracrRNA sequence (e.g., 125/230), the 3′ tracrRNA sequence (e.g., 130/235), and/or the tracrRNA extension sequence (e.g., 135/240). The protein-binding segment of a nucleic acid-targeting nucleic acid can interact with a site-directed polypeptide. The protein-binding segment of a nucleic acid-targeting nucleic acid can comprise two stretches of nucleotides that that can hybridize to one another. The nucleotides of the protein-binding segment can hybridize to form a double-stranded nucleic acid duplex. The double-stranded nucleic acid duplex can be RNA. The double-stranded nucleic acid duplex can be DNA.

[0177] In some instances, a nucleic acid-targeting nucleic acid can comprise, in the order of 5′ to 3′, a spacer extension, a spacer, a minimum CRISPR repeat, a single guide connector, a minimum tracrRNA, a 3′ tracrRNA sequence, and a tracrRNA extension. In some instances, a nucleic acid-targeting nucleic acid can comprise, a tracrRNA extension, a 3′tracrRNA sequence, a minimum tracrRNA, a single guide connector, a minimum CRISPR repeat, a spacer, and a spacer extension in any order.

[0178] In some instances, a nucleic acid-targeting nucleic acid comprises a spacer, a lower stem, an upper stem, a bulge, a nexus, and one or more 3′ hairpins. The lower stem and the upper stem can be separated by the bulge. The lower stem and the upper stem can comprise a duplex between the minimum CRISPR repeat and the minimum tracrRNA.

[0179] A nucleic acid-targeting nucleic acid and a site-directed polypeptide can form a complex. The nucleic acid-targeting nucleic acid can provide target specificity to the complex by comprising a nucleotide sequence that can hybridize to a sequence of a target nucleic acid (e.g., a spacer). In other words, the site-directed polypeptide can be guided to a nucleic acid sequence by virtue of its association with at least the protein-binding segment of the nucleic acid-targeting nucleic acid. The nucleic acid-targeting nucleic acid can direct the activity of a Cas9 protein. The nucleic acid-targeting nucleic acid can direct the activity of an enzymatically inactive Cas9 protein.

[0180] Methods of the disclosure can provide for a genetically modified cell. A genetically modified cell can comprise an exogenous nucleic acid-targeting nucleic acid and/or an exogenous nucleic acid comprising a nucleotide sequence encoding a nucleic acid-targeting nucleic acid.

[0181] Spacer Extension Sequence

[0182] A spacer extension sequence can provide stability and/or provide a location for modifications of a nucleic acid-targeting nucleic acid. A spacer extension sequence or 5′ spacer extension sequence can be 5′ to a spacer. A spacer extension sequence can have a length of from about 1 nucleotide to about 400 nucleotides. A spacer extension sequence can have a length of more than 1, 5, 10, 15, 20, 25, 30, 35, 40, 45, 50, 60, 70, 80, 90, 100, 120, 140, 160, 180, 200, 220, 240, 260, 280, 300, 320, 340, 360, 380, 400, 1000, 2000, 3000, 4000, 5000, 6000, or 7000 or more nucleotides. A spacer extension sequence can have a length of less than 1, 5, 10, 15, 20, 25, 30, 35, 40, 45, 50, 60, 70, 80, 90, 100, 120, 140, 160, 180, 200, 220, 240, 260, 280, 300, 320, 340, 360, 380, 400, 1000, 2000, 3000, 4000, 5000, 6000, 7000 or more nucleotides. A spacer extension sequence can be less than 10 nucleotides in length. A spacer extension sequence can be between 10 and 30 nucleotides in length. A spacer extension sequence can be between 30-70 nucleotides in length.

[0183] The spacer extension sequence can comprise a moiety (e.g., a stability control sequence, an endoribonuclease binding sequence, a ribozyme). A moiety can influence the stability of a nucleic acid targeting RNA. A moiety can be a transcriptional terminator segment (i.e., a transcription termination sequence). A moiety of a nucleic acid-targeting nucleic acid can have a total length of from about 10 nucleotides to about 100 nucleotides, from about 10 nucleotides (nt) to about 20 nt, from about 20 nt to about 30 nt, from about 30 nt to about 40 nt, from about 40 nt to about 50 nt, from about 50 nt to about 60 nt, from about 60 nt to about 70 nt, from about 70 nt to about 80 nt, from about 80 nt to about 90 nt, or from about 90 nt to about 100 nt, from about 15 nucleotides (nt) to about 80 nt, from about 15 nt to about 50 nt, from about 15 nt to about 40 nt, from about 15 nt to about 30 nt or from about 15 nt to about 25 nt. The moiety can be one that can function in a eukaryotic cell. In some cases, the moiety can be one that can function in a prokaryotic cell. The moiety can be one that can function in both a eukaryotic cell and a prokaryotic cell.

[0184] Non-limiting examples of suitable moieties can include: 5′ cap (e.g., a 7-methylguanylate cap (m7 G)), a riboswitch sequence (e.g., to allow for regulated stability and/or regulated accessibility by proteins and protein complexes), a sequence that forms a dsRNA duplex (i.e., a hairpin), a sequence that targets the RNA to a subcellular location (e.g., nucleus, mitochondria, chloroplasts, and the like), a modification or sequence that provides for tracking (e.g., direct conjugation to a fluorescent molecule, conjugation to a moiety that facilitates fluorescent detection, a sequence that allows for fluorescent detection, etc.), a modification or sequence that provides a binding site for proteins (e.g., proteins that act on DNA, including transcriptional activators, transcriptional repressors, DNA methyltransferases, DNA demethylases, histone acetyltransferases, histone deacetylases, and the like) a modification or sequence that provides for increased, decreased, and/or controllable stability, or any combination thereof. A spacer extension sequence can comprise a primer binding site, a molecular index (e.g., barcode sequence). The spacer extension sequence can comprise a nucleic acid affinity tag.

[0185] Spacer

[0186] The nucleic acid-targeting segment of a nucleic acid-targeting nucleic acid can comprise a nucleotide sequence (e.g., a spacer) that can hybridize to a sequence in a target nucleic acid. The spacer of a nucleic acid-targeting nucleic acid can interact with a target nucleic acid in a sequence-specific manner via hybridization (i.e., base pairing). As such, the nucleotide sequence of the spacer may vary and can determine the location within the target nucleic acid that the nucleic acid-targeting nucleic acid and site-directed polypeptide can interact.

[0187] The spacer sequence can hybridize to a target nucleic acid that is located 5′ of protospacer adjacent motif (PAM). Different organisms may comprise different PAM sequences. For example, in S. pyogenes, the PAM can be a sequence in the target nucleic acid that comprises the sequence 5′-XRR-3′, where R can be either A or G, where X is any nucleotide and X is immediately 3′ of the target nucleic acid sequence targeted by the spacer sequence.

[0188] The target nucleic acid sequence can be 20 nucleotides. The target nucleic acid can be less than 20 nucleotides. The target nucleic acid can be at least 5, 10, 15, 16, 17, 18, 19, 20, 21, 22, 23, 24, 25, 30 or more nucleotides. The target nucleic acid can be at most 5, 10, 15, 16, 17, 18, 19, 20, 21, 22, 23, 24, 25, 30 or more nucleotides. The target nucleic acid sequence can be 20 bases immediately 5′ of the first nucleotide of the PAM. For example, in a sequence comprising 5′-NNNXRR-3′, the target nucleic acid can be the sequence that corresponds to the N's, wherein N is any nucleotide.

[0189] The nucleic acid-targeting sequence of the spacer that can hybridize to the target nucleic acid can have a length at least about 6 nt. For example, the spacer sequence that can hybridize the target nucleic acid can have a length at least about 6 nt, at least about 10 nt, at least about 15 nt, at least about 18 nt, at least about 19 nt, at least about 20 nt, at least about 25 nt, at least about 30 nt, at least about 35 nt or at least about 40 nt, from about 6 nt to about 80 nt, from about 6 nt to about 50 nt, from about 6 nt to about 45 nt, from about 6 nt to about 40 nt, from about 6 nt to about 35 nt, from about 6 nt to about 30 nt, from about 6 nt to about 25 nt, from about 6 nt to about 20 nt, from about 6 nt to about 19 nt, from about 10 nt to about 50 nt, from about 10 nt to about 45 nt, from about 10 nt to about 40 nt, from about 10 nt to about 35 nt, from about 10 nt to about 30 nt, from about 10 nt to about 25 nt, from about 10 nt to about 20 nt, from about 10 nt to about 19 nt, from about 19 nt to about 25 nt, from about 19 nt to about 30 nt, from about 19 nt to about 35 nt, from about 19 nt to about 40 nt, from about 19 nt to about 45 nt, from about 19 nt to about 50 nt, from about 19 nt to about 60 nt, from about 20 nt to about 25 nt, from about 20 nt to about 30 nt, from about 20 nt to about 35 nt, from about 20 nt to about 40 nt, from about 20 nt to about 45 nt, from about 20 nt to about 50 nt, or from about 20 nt to about 60 nt. In some cases, the spacer sequence that can hybridize the target nucleic acid can be 20 nucleotides in length. The spacer that can hybridize the target nucleic acid can be 19 nucleotides in length.

[0190] The percent complementarity between the spacer sequence the target nucleic acid can be at least about 30%, at least about 40%, at least about 50%, at least about 60%, at least about 65%, at least about 70%, at least about 75%, at least about 80%, at least about 85%, at least about 90%, at least about 95%, at least about 97%, at least about 98%, at least about 99%, or 100%. The percent complementarity between the spacer sequence the target nucleic acid can be at most about 30%, at most about 40%, at most about 50%, at most about 60%, at most about 65%, at most about 70%, at most about 75%, at most about 80%, at most about 85%, at most about 90%, at most about 95%, at most about 97%, at most about 98%, at most about 99%, or 100%. In some cases, the percent complementarity between the spacer sequence and the target nucleic acid can be 100% over the six contiguous 5′-most nucleotides of the target sequence of the complementary strand of the target nucleic acid. In some cases, the percent complementarity between the spacer sequence and the target nucleic acid can be at least 60% over about 20 contiguous nucleotides. In some cases, the percent complementarity between the spacer sequence and the target nucleic acid can be 100% over the fourteen contiguous 5′-most nucleotides of the target sequence of the complementary strand of the target nucleic acid and as low as 0% over the remainder. In such a case, the spacer sequence can be considered to be 14 nucleotides in length. In some cases, the percent complementarity between the spacer sequence and the target nucleic acid can be 100% over the six contiguous 5′-most nucleotides of the target sequence of the complementary strand of the target nucleic acid and as low as 0% over the remainder. In such a case, the spacer sequence can be considered to be 6 nucleotides in length. The target nucleic acid can be more than about 50%, 60%, 70%, 80%, 90%, or 100% complementary to the seed region of the crRNA. The target nucleic acid can be less than about 50%, 60%, 70%, 80%, 90%, or 100% complementary to the seed region of the crRNA.

[0191] The spacer segment of a nucleic acid-targeting nucleic acid can be modified (e.g., by genetic engineering) to hybridize to any desired sequence within a target nucleic acid. For example, a spacer can be engineered (e.g., designed, programmed) to hybridize to a sequence in target nucleic acid that is involved in cancer, cell growth, DNA replication, DNA repair, HLA genes, cell surface proteins, T-cell receptors, immunoglobulin superfamily genes, tumor suppressor genes, microRNA genes, long non-coding RNA genes, transcription factors, globins, viral proteins, mitochondrial genes, and the like.

[0192] A spacer sequence can be identified using a computer program (e.g., machine readable code). The computer program can use variables such as predicted melting temperature, secondary structure formation, and predicted annealing temperature, sequence identity, genomic context, chromatin accessibility, % GC, frequency of genomic occurrence, methylation status, presence of SNPs, and the like.

[0193] Minimum CRISPR Repeat Sequence

[0194] A minimum CRISPR repeat sequence can be a sequence at least about 30%, 40%, 50%, 60%, 65%, 70%, 75%, 80%, 85%, 90%, 95%, or 100% sequence identity and/or sequence homology with a reference CRISPR repeat sequence (e.g., crRNA from S. pyogenes). A minimum CRISPR repeat sequence can be a sequence with at most about 30%, 40%, 50%, 60%, 65%, 70%, 75%, 80%, 85%, 90%, 95%, or 100% sequence identity and/or sequence homology with a reference CRISPR repeat sequence (e.g., crRNA from S. pyogenes). A minimum CRISPR repeat can comprise nucleotides that can hybridize to a minimum tracrRNA sequence. A minimum CRISPR repeat and a minimum tracrRNA sequence can form a base-paired, double-stranded structure. Together, the minimum CRISPR repeat and the minimum tracrRNA sequence can facilitate binding to the site-directed polypeptide. A part of the minimum CRISPR repeat sequence can hybridize to the minimum tracrRNA sequence. A part of the minimum CRISPR repeat sequence can be at least about 30%, 40%, 50%, 60%, 65%, 70%, 75%, 80%, 85%, 90%, 95%, or 100% complementary to the minimum tracrRNA sequence. A part of the minimum CRISPR repeat sequence can be at most about 30%, 40%, 50%, 60%, 65%, 70%, 75%, 80%, 85%, 90%, 95%, or 100% complementary to the minimum tracrRNA sequence.

[0195] The minimum CRISPR repeat sequence can have a length of from about 6 nucleotides to about 100 nucleotides. For example, the minimum CRISPR repeat sequence can have a length of from about 6 nucleotides (nt) to about 50 nt, from about 6 nt to about 40 nt, from about 6 nt to about 30 nt, from about 6 nt to about 25 nt, from about 6 nt to about 20 nt, from about 6 nt to about 15 nt, from about 8 nt to about 40 nt, from about 8 nt to about 30 nt, from about 8 nt to about 25 nt, from about 8 nt to about 20 nt or from about 8 nt to about 15 nt, from about 15 nt to about 100 nt, from about 15 nt to about 80 nt, from about 15 nt to about 50 nt, from about 15 nt to about 40 nt, from about 15 nt to about 30 nt or from about 15 nt to about 25 nt. In some embodiments, the minimum CRISPR repeat sequence has a length of approximately 12 nucleotides.

[0196] The minimum CRISPR repeat sequence can be at least about 60% identical to a reference minimum CRISPR repeat sequence (e.g., wild type crRNA from S. pyogenes) over a stretch of at least 6, 7, or 8 contiguous nucleotides. The minimum CRISPR repeat sequence can be at least about 60% identical to a reference minimum CRISPR repeat sequence (e.g., wild type crRNA from S. pyogenes) over a stretch of at least 6, 7, or 8 contiguous nucleotides. For example, the minimum CRISPR repeat sequence can be at least about 65% identical, at least about 70% identical, at least about 75% identical, at least about 80% identical, at least about 85% identical, at least about 90% identical, at least about 95% identical, at least about 98% identical, at least about 99% identical or 100% identical to a reference minimum CRISPR repeat sequence over a stretch of at least 6, 7, or 8 contiguous nucleotides.

[0197] Minimum tracrRNA Sequence

[0198] A minimum tracrRNA sequence can be a sequence with at least about 30%, 40%, 50%, 60%, 65%, 70%, 75%, 80%, 85%, 90%, 95%, or 100% sequence identity and/or sequence homology to a reference tracrRNA sequence (e.g., wild type tracrRNA from S. pyogenes). A minimum tracrRNA sequence can be a sequence with at most about 30%, 40%, 50%, 60%, 65%, 70%, 75%, 80%, 85%, 90%, 95%, or 100% sequence identity and/or sequence homology to a reference tracrRNA sequence (e.g., wild type tracrRNA from S. pyogenes). A minimum tracrRNA sequence can comprise nucleotides that can hybridize to a minimum CRISPR repeat sequence. A minimum tracrRNA sequence and a minimum CRISPR repeat sequence can form a base-paired, double-stranded structure. Together, the minimum tracrRNA sequence and the minimum CRISPR repeat can facilitate binding to the site-directed polypeptide. A part of the minimum tracrRNA sequence can hybridize to the minimum CRISPR repeat sequence. A part of the minimum tracrRNA sequence can be 30%, 40%, 50%, 60%, 65%, 70%, 75%, 80%, 85%, 90%, 95%, or 100% complementary to the minimum CRISPR repeat sequence.

[0199] The minimum tracrRNA sequence can have a length of from about 6 nucleotides to about 100 nucleotides. For example, the minimum tracrRNA sequence can have a length of from about 6 nucleotides (nt) to about 50 nt, from about 6 nt to about 40 nt, from about 6 nt to about 30 nt, from about 6 nt to about 25 nt, from about 6 nt to about 20 nt, from about 6 nt to about 15 nt, from about 8 nt to about 40 nt, from about 8 nt to about 30 nt, from about 8 nt to about 25 nt, from about 8 nt to about 20 nt or from about 8 nt to about 15 nt, from about 15 nt to about 100 nt, from about 15 nt to about 80 nt, from about 15 nt to about 50 nt, from about 15 nt to about 40 nt, from about 15 nt to about 30 nt or from about 15 nt to about 25 nt. In some embodiments, the minimum tracrRNA sequence has a length of approximately 14 nucleotides.

[0200] The minimum tracrRNA sequence can be at least about 60% identical to a reference minimum tracrRNA (e.g., wild type, tracrRNA from S. pyogenes) sequence over a stretch of at least 6, 7, or 8 contiguous nucleotides. The minimum tracrRNA sequence can be at least about 60% identical to a reference minimum tracrRNA (e.g., wild type, tracrRNA from S. pyogenes) sequence over a stretch of at least 6, 7, or 8 contiguous nucleotides. For example, the minimum tracrRNA sequence can be at least about 65% identical, at least about 70% identical, at least about 75% identical, at least about 80% identical, at least about 85% identical, at least about 90% identical, at least about 95% identical, at least about 98% identical, at least about 99% identical or 100% identical to a reference minimum tracrRNA sequence over a stretch of at least 6, 7, or 8 contiguous nucleotides.

[0201] The duplex (i.e., first duplex in FIG. 1B) between the minimum CRISPR RNA and the minimum tracrRNA can comprise a double helix. The first base of the first strand of the duplex (e.g., the minimum CRISPR repeat in FIG. 1B) can be a guanine. The first base of the first strand of the duplex (e.g., the minimum CRISPR repeat in FIG. 1B) can be an adenine. The duplex (i.e., first duplex in FIG. 1B) between the minimum CRISPR RNA and the minimum tracrRNA can comprise at least about 1, 2, 3, 4, 5, 6, 7, 8, 9, or 10 or more nucleotides. The duplex (i.e., first duplex in FIG. 1B) between the minimum CRISPR RNA and the minimum tracrRNA can comprise at most about 1, 2, 3, 4, 5, 6, 7, 8, 9, or 10 or more nucleotides.

[0202] The duplex can comprise a mismatch. The duplex can comprise at least about 1, 2, 3, 4, or 5 or mismatches. The duplex can comprise at most about 1, 2, 3, 4, or 5 or mismatches. In some instances, the duplex comprises no more than 2 mismatches.

[0203] Bulge

[0204] A bulge can refer to an unpaired region of nucleotides within the duplex made up of the minimum CRISPR repeat and the minimum tracrRNA sequence. The bulge can be important in the binding to the site-directed polypeptide. A bulge can comprise, on one side of the duplex, an unpaired 5′-XXXY-3′ where X is any purine and Y can be a nucleotide that can form a wobble pair with a nucleotide on the opposite strand, and an unpaired nucleotide region on the other side of the duplex.

[0205] For example, the bulge can comprise an unpaired purine (e.g., adenine) on the minimum CRISPR repeat strand of the bulge. In some embodiments, a bulge can comprise an unpaired 5′-AAGY-3′ of the minimum tracrRNA sequence strand of the bulge, where Y can be a nucleotide that can form a wobble pairing with a nucleotide on the minimum CRISPR repeat strand.

[0206] A bulge on a first side of the duplex (e.g., the minimum CRISPR repeat side) can comprise at least 1, 2, 3, 4, or 5 or more unpaired nucleotides. A bulge on a first side of the duplex (e.g., the minimum CRISPR repeat side) can comprise at most 1, 2, 3, 4, or 5 or more unpaired nucleotides. A bulge on the first side of the duplex (e.g., the minimum CRISPR repeat side) can comprise 1 unpaired nucleotide.

[0207] A bulge on a second side of the duplex (e.g., the minimum tracrRNA sequence side of the duplex) can comprise at least 1, 2, 3, 4, 5, 6, 7, 8, 9, or 10 or more unpaired nucleotides. A bulge on a second side of the duplex (e.g., the minimum tracrRNA sequence side of the duplex) can comprise at most 1, 2, 3, 4, 5, 6, 7, 8, 9, or 10 or more unpaired nucleotides. A bulge on a second side of the duplex (e.g., the minimum tracrRNA sequence side of the duplex) can comprise 4 unpaired nucleotides.

[0208] Regions of different numbers of unpaired nucleotides on each strand of the duplex can be paired together. For example, a bulge can comprise 5 unpaired nucleotides from a first strand and 1 unpaired nucleotide from a second strand. A bulge can comprise 4 unpaired nucleotides from a first strand and 1 unpaired nucleotide from a second strand. A bulge can comprise 3 unpaired nucleotides from a first strand and 1 unpaired nucleotide from a second strand. A bulge can comprise 2 unpaired nucleotides from a first strand and 1 unpaired nucleotide from a second strand. A bulge can comprise 1 unpaired nucleotide from a first strand and 1 unpaired nucleotide from a second strand. A bulge can comprise 1 unpaired nucleotide from a first strand and 2 unpaired nucleotides from a second strand. A bulge can comprise 1 unpaired nucleotide from a first strand and 3 unpaired nucleotides from a second strand. A bulge can comprise 1 unpaired nucleotide from a first strand and 4 unpaired nucleotides from a second strand. A bulge can comprise 1 unpaired nucleotide from a first strand and 5 unpaired nucleotides from a second strand.

[0209] In some instances a bulge can comprise at least one wobble pairing. In some instances, a bulge can comprise at most one wobble pairing. A bulge sequence can comprise at least one purine nucleotide. A bulge sequence can comprise at least 3 purine nucleotides. A bulge sequence can comprise at least 5 purine nucleotides. A bulge sequence can comprise at least one guanine nucleotide. A bulge sequence can comprise at least one adenine nucleotide.

[0210] Nexus

[0211] The nexus can be located downstream of (i.e., located in the 3′ direction from) the first stem-loop duplex element. An exemplary location of the nexus is illustrated in the single-guide RNA (sgRNA) nucleic acid targeting nucleic acid used to support activity with the S. pyogenes Cas9 protein shown in FIG. 1A (130).

[0212] A nexus can start at least about 1, 2, 3, 4, 5, 6, 7, 8, 9, 10, 15, or 20 or more nucleotides 3′ of the last paired nucleotide in the minimum CRISPR repeat and minimum tracrRNA sequence duplex. A nexus can start at most about 1, 2, 3, 4, 5, 6, 7, 8, 9 or 10 or more nucleotides 3′ of the last paired nucleotide in the minimum CRISPR repeat and minimum tracrRNA sequence duplex.

[0213] A nexus can comprise at least about 1, 2, 3, 4, 5, 6, 7, 8, 9, 10, 15, or 20 or more consecutive nucleotides. A nexus can comprise at most about 1, 2, 3, 4, 5, 6, 7, 8, 9, 10, 15, or 20 or more consecutive nucleotides.

[0214] A nexus can comprise a hairpin. The stem duplex of the hairpin can comprise a dinucleotide duplex (e.g., two stacked base-paired nucleotides). The stem duplex of the hairpin can comprise a tri-nucleotide duplex (e.g., three stacked base-paired nucleotides). The stem duplex of the hairpin can comprise a quattro-nucleotide duplex (e.g., four stacked base-paired nucleotides). The hairpin can comprise a stem loop. The stem loop structure of the hairpin of the nexus can comprise at least 1, 2, 3, 4, 5, 6, 7, 8, 9, or 10 or more nucleotides. The stem loop structure of the hairpin of the nexus can comprise at most 1, 2, 3, 4, 5, 6, 7, 8, 9, or 10 or more nucleotides.

[0215] A nexus can be a nucleotide sequence located in the 3′ tracrRNA sequence (i.e., mid-tracrRNA sequence). A nexus can comprise duplexed nucleotides (e.g., nucleotides in a hairpin, hybridized together. For example, a nexus can comprise a CC dinucleotide that is hybridized to a GG dinucleotide in a hairpin duplex of the 3′ tracrRNA sequence (i.e., mid-tracrRNA sequence).

[0216] The nexus can interact with nexus interacting regions within the site-directed polypeptide. The nexus can interact with an arginine-rich basic patch in the site-directed polypeptide. The nexus interacting regions can interact with a PAM sequence. The nexus can comprise a stem loop. The nexus can comprise a bulge.

[0217] 3 ‘tracrRNA Sequence or Hairpins

[0218] As used herein, the terms “3’ tracrRNA sequence” and “hairpins,” “3′ hairpins,” or “hairpins region” can be used interchangeably. A 3′tracr RNA sequence can be a sequence with at least about 30%, 40%, 50%, 60%, 65%, 70%, 75%, 80%, 85%, 90%, 95%, or 100% sequence identity and/or sequence homology with a reference tracrRNA sequence (e.g., a tracrRNA from S. pyogenes). A 3′tracr RNA sequence can be a sequence with at most about 30%, 40%, 50%, 60%, 65%, 70%, 75%, 80%, 85%, 90%, 95%, or 100% sequence identity and/or sequence homology with a reference tracrRNA sequence (e.g., tracrRNA from S. pyogenes).

[0219] The 3′ tracrRNA sequence can have a length of from about 6 nucleotides to about 100 nucleotides. For example, the 3′ tracrRNA sequence can have a length of from about 6 nucleotides (nt) to about 50 nt, from about 6 nt to about 40 nt, from about 6 nt to about 30 nt, from about 6 nt to about 25 nt, from about 6 nt to about 20 nt, from about 6 nt to about 15 nt, from about 8 nt to about 40 nt, from about 8 nt to about 30 nt, from about 8 nt to about 25 nt, from about 8 nt to about 20 nt or from about 8 nt to about 15 nt, from about 15 nt to about 100 nt, from about 15 nt to about 80 nt, from about 15 nt to about 50 nt, from about 15 nt to about 40 nt, from about 15 nt to about 30 nt or from about 15 nt to about 25 nt. In some embodiments, the 3′ tracrRNA sequence has a length of approximately 14 nucleotides.

[0220] The 3′ tracrRNA sequence can be at least about 60% identical to a reference 3′ tracrRNA sequence (e.g., wild type 3′ tracrRNA sequence from S. pyogenes) over a stretch of at least 6, 7, or 8 contiguous nucleotides. For example, the 3′ tracrRNA sequence can be at least about 60% identical, at least about 65% identical, at least about 70% identical, at least about 75% identical, at least about 80% identical, at least about 85% identical, at least about 90% identical, at least about 95% identical, at least about 98% identical, at least about 99% identical, or 100% identical, to a reference 3′ tracrRNA sequence (e.g., wild type 3′ tracrRNA sequence from S. pyogenes) over a stretch of at least 6, 7, or 8 contiguous nucleotides.

[0221] A 3′ tracrRNA sequence can comprise more than one duplexed region (e.g., hairpin, hybridized region). A 3′ tracrRNA sequence can comprise two duplexed regions.

[0222] The 3′ tracrRNA sequence can also be referred to as the mid-tracrRNA (See FIG. 1B). The mid-tracrRNA sequence can comprise a stem loop structure. In other words, the mid-tracrRNA sequence can comprise a hairpin that is different than a second or third stems, as depicted in FIG. 1B. A stem loop structure in the mid-tracrRNA (i.e., 3′ tracrRNA) can comprise at least 1, 2, 3, 4, 5, 6, 7, 8, 9, 10, 15 or 20 or more nucleotides. A stem loop structure in the mid-tracrRNA (i.e., 3′ tracrRNA) can comprise at most 1, 2, 3, 4, 5, 6, 7, 8, 9 or 10 or more nucleotides. The stem loop structure can comprise a functional moiety. For example, the stem loop structure can comprise an aptamer, a ribozyme, a protein-interacting hairpin, a CRISPR array, an intron, and an exon. The stem loop structure can comprise at least about 1, 2, 3, 4, or 5 or more functional moieties. The stem loop structure can comprise at most about 1, 2, 3, 4, or 5 or more functional moieties.

[0223] Loop

[0224] A nucleic acid-targeting nucleic acid of the disclosure can comprise a loop region. The loop region can separate the nexus from the 3′ tracrRNA (e.g., hairpins) sequence. The loop region can refer to consecutive single-stranded nucleotides between the nexus and the hairpins of the 3′ tracrRNA. The 3′ tracrRNA sequence can comprise the loop. The loop region can be at least 1, 2, 3, 4, 5, 6, 7, 8, 9, or 10 or more nucleotides in length. The loop region can be at most 1, 2, 3, 4, 5, 6, 7, 8, 9, or 10 or more nucleotides in length.

[0225] A loop region can be a sequence with at least about 30%, 40%, 50%, 60%, 65%, 70%, 75%, 80%, 85%, 90%, 95%, or 100% sequence identity and/or sequence homology with a reference loop region (e.g., a loop region from S. pyogenes). A loop region can be a sequence with at most about 30%, 40%, 50%, 60%, 65%, 70%, 75%, 80%, 85%, 90%, 95%, or 100% sequence identity and/or sequence homology with a reference loop region (e.g., a loop region from S. pyogenes).

[0226] tracrRNA Extension Sequence

[0227] A tracrRNA extension sequence can provide stability and/or provide a location for modifications of a nucleic acid-targeting nucleic acid. A tracrRNA extension sequence can have a length of from about 1 nucleotide to about 400 nucleotides. A tracrRNA extension sequence can have a length of more than 1, 5, 10, 15, 20, 25, 30, 35, 40, 45, 50, 60, 70, 80, 90, 100, 120, 140, 160, 180, 200, 220, 240, 260, 280, 300, 320, 340, 360, 380, 400 or more nucleotides. A tracrRNA extension sequence can have a length from about 20 to about 5000 or more nucleotides. A tracrRNA extension sequence can have a length of more than 1000 nucleotides. A tracrRNA extension sequence can have a length of less than 1, 5, 10, 15, 20, 25, 30, 35, 40, 45, 50, 60, 70, 80, 90, 100, 120, 140, 160, 180, 200, 220, 240, 260, 280, 300, 320, 340, 360, 380, 400 nucleotides. A tracrRNA extension sequence can have a length of less than 1000 nucleotides. A tracrRNA extension sequence can be less than 10 nucleotides in length. A tracrRNA extension sequence can be between 10 and 30 nucleotides in length. A tracrRNA extension sequence can be between 30-70 nucleotides in length.

[0228] The tracrRNA extension sequence can comprise a moiety (e.g., stability control sequence, ribozyme, endoribonuclease binding sequence). A moiety can influence the stability of a nucleic acid targeting RNA. A moiety can be a transcriptional terminator segment (i.e., a transcription termination sequence). A moiety of a nucleic acid-targeting nucleic acid can have a total length of from about 10 nucleotides to about 100 nucleotides, from about 10 nucleotides (nt) to about 20 nt, from about 20 nt to about 30 nt, from about 30 nt to about 40 nt, from about 40 nt to about 50 nt, from about 50 nt to about 60 nt, from about 60 nt to about 70 nt, from about 70 nt to about 80 nt, from about 80 nt to about 90 nt, or from about 90 nt to about 100 nt, from about 15 nucleotides (nt) to about 80 nt, from about 15 nt to about 50 nt, from about 15 nt to about 40 nt, from about 15 nt to about 30 nt or from about 15 nt to about 25 nt. The moiety can be one that can function in a eukaryotic cell. In some cases, the moiety can be one that can function in a prokaryotic cell. The moiety can be one that can function in both a eukaryotic cell and a prokaryotic cell.

[0229] Non-limiting examples of suitable tracrRNA extension moieties include: a 3′ poly-adenylated tail, a riboswitch sequence (e.g., to allow for regulated stability and/or regulated accessibility by proteins and protein complexes), a sequence that forms a dsRNA duplex (i.e., a hairpin), a sequence that targets the RNA to a subcellular location (e.g., nucleus, mitochondria, chloroplasts, and the like), a modification or sequence that provides for tracking (e.g., direct conjugation to a fluorescent molecule, conjugation to a moiety that facilitates fluorescent detection, a sequence that allows for fluorescent detection, etc.), a modification or sequence that provides a binding site for proteins (e.g., proteins that act on DNA, including transcriptional activators, transcriptional repressors, DNA methyltransferases, DNA demethylases, histone acetyltransferases, histone deacetylases, and the like) a modification or sequence that provides for increased, decreased, and/or controllable stability, or any combination thereof. A tracrRNA extension sequence can comprise a primer binding site, a molecular index (e.g., barcode sequence). In some embodiments of the disclosure, the tracrRNA extension sequence can comprise one or more affinity tags.

[0230] Single Guide Nucleic Acid

[0231] The nucleic acid-targeting nucleic acid can be a single guide nucleic acid. The single guide nucleic acid can be RNA (e.g., sgRNA). A single guide nucleic acid can comprise a linker (i.e. item 120 from FIG. 1A) between the minimum CRISPR repeat sequence and the minimum tracrRNA sequence that can be called a single guide connector sequence.

[0232] The single guide connector of a single guide nucleic acid can have a length of from about 3 nucleotides to about 100 nucleotides. For example, the linker can have a length of from about 3 nucleotides (nt) to about 90 nt, from about 3 nt to about 80 nt, from about 3 nt to about 70 nt, from about 3 nt to about 60 nt, from about 3 nt to about 50 nt, from about 3 nt to about 40 nt, from about 3 nt to about 30 nt, from about 3 nt to about 20 nt or from about 3 nt to about 10 nt. For example, the linker can have a length of from about 3 nt to about 5 nt, from about 5 nt to about 10 nt, from about 10 nt to about 15 nt, from about 15 nt to about 20 nt, from about 20 nt to about 25 nt, from about 25 nt to about 30 nt, from about 30 nt to about 35 nt, from about 35 nt to about 40 nt, from about 40 nt to about 50 nt, from about 50 nt to about 60 nt, from about 60 nt to about 70 nt, from about 70 nt to about 80 nt, from about 80 nt to about 90 nt, or from about 90 nt to about 100 nt. In some embodiments, the linker of a single guide nucleic acid is between 4 and 40 nucleotides. A linker can have a length at least about 100, 500, 1000, 1500, 2000, 2500, 3000, 3500, 4000, 4500, 5000, 5500, 6000, 6500, or 7000 or more nucleotides. A linker can have a length at most about 100, 500, 1000, 1500, 2000, 2500, 3000, 3500, 4000, 4500, 5000, 5500, 6000, 6500, or 7000 or more nucleotides.

[0233] The linker sequence can comprise a functional moiety. For example, the linker sequence can comprise an aptamer, a ribozyme, a protein-interacting hairpin, a CRISPR array, an intron, and an exon. The linker sequence can comprise at least about 1, 2, 3, 4, or 5 or more functional moieties. The linker sequence can comprise at most about 1, 2, 3, 4, or 5 or more functional moieties.

[0234] In some embodiments, the single guide connector can connect the 3′ end of the minimum CRISPR repeat to the 5′ end of the minimum tracrRNA sequence. Alternatively, the single guide connector can connect the 3′ end of the tracrRNA sequence to the 5′ end of the minimum CRISPR repeat. That is to say, a single guide nucleic acid can comprise a 5′ DNA-binding segment linked to a 3′ protein-binding segment. A single guide nucleic acid can comprise a 5′ protein-binding segment linked to a 3′ DNA-binding segment.

[0235] A nucleic acid-targeting nucleic acid can comprise a spacer extension sequence from 10-5000 nucleotides in length; a spacer sequence of 12-30 nucleotides in length, wherein the spacer is at least 50% complementary to a target nucleic acid; a minimum CRISPR repeat comprising at least 60% identity to a crRNA from a prokaryote (e.g., S. pyogenes) or phage over 6, 7, or 8 contiguous nucleotides and wherein the minimum CRISPR repeat has a length from 5-30 nucleotides; a minimum tracrRNA sequence comprising at least 60% identity to a tracrRNA from a bacterium (e.g., S. pyogenes) over 6, 7, or 8 contiguous nucleotides and wherein the minimum tracrRNA sequence has a length from 5-30 nucleotides; a linker sequence that links the minimum CRISPR repeat and the minimum tracrRNA and comprises a length from 3-5000 nucleotides; a 3′ tracrRNA that comprises at least 60% identity to a tracrRNA from a prokaryote (e.g., S. pyogenes) or phage over 6, 7, or 8 contiguous nucleotides and wherein the 3′ tracrRNA comprises a length from 10-20 nucleotides, and comprises a duplexed region; and/or a tracrRNA extension comprising 10-5000 nucleotides in length, or any combination thereof. This nucleic acid-targeting nucleic acid can be referred to as a single guide nucleic acid-targeting nucleic acid.

[0236] A nucleic acid-targeting nucleic acid can comprise a spacer extension sequence from 10-5000 nucleotides in length; a spacer sequence of 12-30 nucleotides in length, wherein the spacer is at least 50% complementary to a target nucleic acid; a duplex comprising 1) a minimum CRISPR repeat comprising at least 60% identity to a crRNA from a prokaryote (e.g., S. pyogenes) or phage over 6 contiguous nucleotides and wherein the minimum CRISPR repeat has a length from 5-30 nucleotides, 2) a minimum tracrRNA sequence comprising at least 60% identity to a tracrRNA from a bacterium (e.g., S. pyogenes) over 6 contiguous nucleotides and wherein the minimum tracrRNA sequence has a length from 5-30 nucleotides, and 3) a bulge wherein the bulge comprises at least 3 unpaired nucleotides on the minimum CRISPR repeat strand of the duplex and at least 1 unpaired nucleotide on the minimum tracrRNA sequence strand of the duplex; a linker sequence that links the minimum CRISPR repeat and the minimum tracrRNA and comprises a length from 3-5000 nucleotides; a 3′ tracrRNA that comprises at least 60% identity to a tracrRNA from a prokaryote (e.g., S. pyogenes) or phage over 6 contiguous nucleotides, wherein the 3′ tracrRNA comprises a length from 10-20 nucleotides and comprises a duplexed region; a nexus that starts from 1-5 nucleotides downstream of the duplex comprising the minimum CRISPR repeat and the minimum tracrRNA, comprises 1-10 nucleotides, can form a hairpin, and is located in the 3′ tracrRNA region; and/or a tracrRNA extension comprising 10-5000 nucleotides in length, or any combination thereof.

[0237] Double Guide Nucleic Acid

[0238] A nucleic acid-targeting nucleic acid can be a double guide nucleic acid. The double guide nucleic acid can be RNA. The double guide nucleic acid can comprise two separate nucleic acid molecules (i.e. polynucleotides). Each of the two nucleic acid molecules of a double guide nucleic acid-targeting nucleic acid can comprise a stretch of nucleotides that can hybridize to one another such that the complementary nucleotides of the two nucleic acid molecules hybridize to form the double stranded duplex of the protein-binding segment. If not otherwise specified, the term “nucleic acid-targeting nucleic acid” can be inclusive, referring to both single-molecule nucleic acid-targeting nucleic acids and double-molecule nucleic acid-targeting nucleic acids.

[0239] A double-guide nucleic acid-targeting nucleic acid can comprise 1) a first nucleic acid molecule comprising a spacer extension sequence from 10-5000 nucleotides in length; a spacer sequence of 12-30 nucleotides in length, wherein the spacer is at least 50% complementary to a target nucleic acid; and a minimum CRISPR repeat comprising at least 60% identity to a crRNA from a prokaryote (e.g., S. pyogenes) or phage over 6 contiguous nucleotides and wherein the minimum CRISPR repeat has a length from 5-30 nucleotides; and 2) a second nucleic acid molecule of the double-guide nucleic acid-targeting nucleic acid can comprise a minimum tracrRNA sequence comprising at least 60% identity to a tracrRNA from a prokaryote (e.g., S. pyogenes) or phage over 6 contiguous nucleotides and wherein the minimum tracrRNA sequence has a length from 5-30 nucleotides; a 3′ tracrRNA that comprises at least 60% identity to a tracrRNA from a bacterium (e.g., S. pyogenes) over 6 contiguous nucleotides and wherein the 3′ tracrRNA comprises a length from 10-20 nucleotides, and comprises a duplexed region; and/or a tracrRNA extension comprising 10-5000 nucleotides in length, or any combination thereof.

[0240] In some instances, a double-guide nucleic acid-targeting nucleic acid can comprise 1) a first nucleic acid molecule comprising a spacer extension sequence from 10-5000 nucleotides in length; a spacer sequence of 12-30 nucleotides in length, wherein the spacer is at least 50% complementary to a target nucleic acid; a minimum CRISPR repeat comprising at least 60% identity to a crRNA from a prokaryote (e.g., S. pyogenes) or phage over 6 contiguous nucleotides and wherein the minimum CRISPR repeat has a length from 5-30 nucleotides, and at least 3 unpaired nucleotides of a bulge; and 2) a second nucleic acid molecule of the double-guide nucleic acid-targeting nucleic acid can comprise a minimum tracrRNA sequence comprising at least 60% identity to a tracrRNA from a prokaryote (e.g., S. pyogenes) or phage over 6 contiguous nucleotides and wherein the minimum tracrRNA sequence has a length from 5-30 nucleotides and at least 1 unpaired nucleotide of a bulge, wherein the 1 unpaired nucleotide of the bulge is located in the same bulge as the 3 unpaired nucleotides of the minimum CRISPR repeat; a 3′ tracrRNA that comprises at least 60% identity to a tracrRNA from a prokaryote (e.g., S. pyogenes) or phage over 6 contiguous nucleotides and wherein the 3′ tracrRNA comprises a length from 10-20 nucleotides, and comprises a duplexed region; a nexus that starts from 1-5 nucleotides downstream of the duplex comprising the minimum CRISPR repeat and the minimum tracrRNA, comprises 1-10 nucleotides, comprises a sequence that can hybridize to a protospacer adjacent motif in a target nucleic acid, can form a hairpin, and is located in the 3′ tracrRNA region; and/or a tracrRNA extension comprising 10-5000 nucleotides in length, or any combination thereof.

[0241] Complex of a Nucleic Acid-Targeting Nucleic Acid and a Site-Directed Polypeptide

[0242] A nucleic acid-targeting nucleic acid can interact with a site-directed polypeptide (e.g., a nucleic acid-guided nucleases, Cas9), thereby forming a complex. The nucleic acid-targeting nucleic acid can guide the site-directed polypeptide to a target nucleic acid.

[0243] In some embodiments, a nucleic acid-targeting nucleic acid can be engineered such that the complex (e.g., comprising a site-directed polypeptide and a nucleic acid-targeting nucleic acid) can bind outside of the cleavage site of the site-directed polpeptide. In this case, the target nucleic acid may not interact with the complex and the target nucleic acid can be excised (e.g., free from the complex).

[0244] In some embodiments, a nucleic acid-targeting nucleic acid can be engineered such that the complex can bind inside of the cleavage site of the site-directed polpeptide. In this case, the target nucleic acid can interact with the complex and the target nucleic acid can be bound (e.g., bound to the complex).

[0245] Any nucleic acid-targeting nucleic acid of the disclosure, a site-directed polypeptide of the disclosure, a donor polynucleotide, and/or any nucleic acid or proteinaceous molecule necessary to carry out the embodiments of the methods of the disclosure may be recombinant, purified and/or isolated.

[0246] Nucleic Acids Encoding a Nucleic Acid-Targeting Nucleic Acid and/or a Site-Directed Polypeptide

[0247] The present disclosure provides for a nucleic acid comprising a nucleotide sequence encoding a nucleic acid-targeting nucleic acid of the disclosure, a site-directed polypeptide of the disclosure, a donor polynucleotide, and/or any nucleic acid or proteinaceous molecule necessary to carry out the embodiments of the methods of the disclosure. In some embodiments, the nucleic acid encoding a nucleic acid-targeting nucleic acid of the disclosure, a site-directed polypeptide of the disclosure, a donor polynucleotide, and/or any nucleic acid or proteinaceous molecule necessary to carry out the embodiments of the methods of the disclosure can be a vector (e.g., a recombinant expression vector).

[0248] In some embodiments, the recombinant expression vector can be a viral construct, (e.g., a recombinant adeno-associated virus construct), a recombinant adenoviral construct, a recombinant lentiviral construct, a recombinant retroviral construct, etc.

[0249] Suitable expression vectors can include, but are not limited to, viral vectors (e.g. viral vectors based on vaccinia virus, poliovirus, adenovirus, adeno-associated virus, SV40, herpes simplex virus, human immunodeficiency virus, a retroviral vector (e.g., Murine Leukemia Virus, spleen necrosis virus, and vectors derived from retroviruses such as Rous Sarcoma Virus, Harvey Sarcoma Virus, avian leukosis virus, a lentivirus, human immunodeficiency virus, myeloproliferative sarcoma virus, and mammary tumor virus), plant vectors (e.g., T-DNA vector), and the like. The following vectors can be provided by way of non-limiting example, for eukaryotic host cells: pXT1, pSG5, pSVK3, pBPV, pMSG, and pSVLSV40 (Pharmacia). Other vectors may be used so long as they are compatible with the host cell.

[0250] In some instances, a vector can be a linearized vector. A linearized vector can comprise a site-directed polypeptide and/or a nucleic acid-targeting nucleic acid. A linearized vector may not be a circular plasmid. A linearized vector can comprise a double-stranded break. A linearized vector may comprise a sequence encoding a fluorescent protein (e.g., orange fluorescent protein (OFP)). A linearized vector may comprise a sequence encoding an antigen (e.g., CD4). A linearized vector can be linearized (e.g., cut) in a region of the vector encoding parts of the nucleic acid-targeting nucleic acid. For example a linearized vector can be linearized (e.g., cut) in a region of the nucleic acid-targeting nucleic acid 5′ to the crRNA portion of the nucleic acid-targeting nucleic acid. A linearized vector can be linearized (e.g., cut) in a region of the nucleic acid-targeting nucleic acid 3′ to the spacer extension sequence of the nucleic acid-targeting nucleic acid. A linearized vector can be linearized (e.g., cut) in a region of the nucleic acid-targeting nucleic acid encoding the crRNA sequence of the nucleic acid-targeting nucleic acid. In some instances, a linearized vector or a closed supercoiled vector comprises a sequence encoding a site-directed polypeptide (e.g., Cas9), a promoter driving expression of the sequence encoding the site-directed polypeptide (e.g., CMV promoter), a sequence encoding a linker (e.g., 2A), a sequence encoding a marker (e.g., CD4 or OFP), a sequence encoding portion of a nucleic acid-targeting nucleic acid, a promoter driving expression of the sequence encoding a portion of the nucleic acid-targeting nucleic acid, and a sequence encoding a selectable marker (e.g., ampicillin), or any combination thereof.

[0251] A vector can comprise a transcription and/or translation control element. Depending on the host/vector system utilized, any of a number of suitable transcription and translation control elements, including constitutive and inducible promoters, transcription enhancer elements, transcription terminators, etc. may be used in the expression vector.

[0252] In some embodiments, a nucleotide sequence encoding a nucleic acid-targeting nucleic acid of the disclosure, a site-directed polypeptide of the disclosure, a donor polynucleotide, and/or any nucleic acid or proteinaceous molecule necessary to carry out the embodiments of the methods of the disclosure can be operably linked to a control element (e.g., a transcriptional control element), such as a promoter. The transcriptional control element may be functional in a eukaryotic cell, (e.g., a mammalian cell), a prokaryotic cell (e.g., bacterial or archaeal cell). In some embodiments, a nucleotide sequence encoding a nucleic acid-targeting nucleic acid of the disclosure, a site-directed polypeptide of the disclosure, a donor polynucleotide, and/or any nucleic acid or proteinaceous molecule necessary to carry out the embodiments of the methods of the disclosure can be operably linked to multiple control elements. Operable linkage to multiple control elements can allow expression of the nucleotide sequence encoding a nucleic acid-targeting nucleic acid of the disclosure, a site-directed polypeptide of the disclosure, a donor polynucleotide, and/or any nucleic acid or proteinaceous molecule necessary to carry out the embodiments of the methods of the disclosure in either prokaryotic or eukaryotic cells.

[0253] Non-limiting examples of suitable eukaryotic promoters (i.e. promoters functional in a eukaryotic cell) can include those from cytomegalovirus (CMV) immediate early, herpes simplex virus (HSV) thymidine kinase, early and late SV40, long terminal repeats (LTRs) from retrovirus, human elongation factor-1 promoter (EF1), a hybrid construct comprising the cytomegalovirus (CMV) enhancer fused to the chicken beta-active promoter (CAG), murine stem cell virus promoter (MSCV), phosphoglycerate kinase-1 locus promoter (PGK) and mouse metallothionein-I. The promoter can be a fungi promoter. The promoter can be a plant promoter. A database of plant promoteres can be found (e.g., PlantProm). The expression vector may also contain a ribosome binding site for translation initiation and a transcription terminator. The expression vector may also include appropriate sequences for amplifying expression. The expression vector may also include nucleotide sequences encoding non-native tags (e.g., 6×His tag, hemagglutinin tag, green fluorescent protein, etc.) that are fused to the site-directed polypeptide, thus resulting in a fusion protein.

[0254] In some embodiments, a nucleotide sequence or sequences encoding a nucleic acid-targeting nucleic acid of the disclosure, a site-directed polypeptide of the disclosure, a donor polynucleotide, and/or any nucleic acid or proteinaceous molecule necessary to carry out the embodiments of the methods of the disclosure can be operably linked to an inducible promoter (e.g., heat shock promoter, tetracycline-regulated promoter, steroid-regulated promoter, metal-regulated promoter, estrogen receptor-regulated promoter, etc.). In some embodiments, a nucleotide sequence encoding a nucleic acid-targeting nucleic acid of the disclosure, a site-directed polypeptide of the disclosure, a donor polynucleotide, and/or any nucleic acid or proteinaceous molecule necessary to carry out the embodiments of the methods of the disclosure can be operably linked to a constitutive promoter (e.g., CMV promoter, UBC promoter). In some embodiments, the nucleotide sequence can be operably linked to a spatially restricted and/or temporally restricted promoter (e.g., a tissue specific promoter, a cell type specific promoter, etc.).

[0255] A nucleotide sequence or sequences encoding a nucleic acid-targeting nucleic acid of the disclosure, a site-directed polypeptide of the disclosure, a donor polynucleotide, and/or any nucleic acid or proteinaceous molecule necessary to carry out the embodiments of the methods of the disclosure can be packaged into or on the surface of biological compartments for delivery to cells. Biological compartments can include, but are not limited to, viruses (lentivirus, adenovirus), nanospheres, liposomes, quantum dots, nanoparticles, polyethylene glycol particles, hydrogels, and micelles.

[0256] Introduction of the complexes, polypeptides, and nucleic acids of the disclosure into cells can occur by viral or bacteriophage infection, transfection, conjugation, protoplast fusion, lipofection, electroporation, calcium phosphate precipitation, polyethyleneimine (PEI)-mediated transfection, DEAE-dextran mediated transfection, liposome-mediated transfection, particle gun technology, calcium phosphate precipitation, direct micro-injection, nanoparticle-mediated nucleic acid delivery, and the like.

[0257] Transgenic Cells and Organisms

[0258] The disclosure provides for transgenic cells and organisms generated or modified using methods and compositions of the disclosure. The nucleic acid of a genetically modified host cell and/or transgenic organism can be targeted for genome engineering.

[0259] Exemplary cells that can be used to generate transgenic cells according to the methods of the disclosure can include, but are not limited to, HeLa cell, Chinese Hamster Ovary cell, 293-T cell, a pheochromocytoma, a neuroblastomas fibroblast, a rhabdomyosarcoma, a dorsal root ganglion cell, a NSO cell, Tobacco BY-2, CV-I (ATCC CCL 70), COS-1 (ATCC CRL 1650), COS-7 (ATCC CRL 1651), CHO-K1 (ATCC CCL 61), 3T3 (ATCC CCL 92), NIH/3T3 (ATCC CRL 1658), HeLa (ATCC CCL 2), C 1271 (ATCC CRL 1616), BS-C-I (ATCC CCL 26), MRC-5 (ATCC CCL 171), L-cells, HEK-293 (ATCC CRL1573) and PC 12 (ATCC CRL-1721), HEK293T (ATCC CRL-11268), RBL (ATCC CRL-1378), SH-SY5Y (ATCC CRL-2266), MDCK (ATCC CCL-34), SJ-RH30 (ATCC CRL-2061), HepG2 (ATCC HB-8065), ND7/23 (ECACC 92090903), CHO (ECACC 85050302), Vera (ATCC CCL 81), Caco-2 (ATCC HTB 37), K562 (ATCC CCL 243), Jurkat (ATCC TIB-152), Per. Có, Huvec (ATCC Human Primary PCS 100-010, Mouse CRL 2514, CRL 2515, CRL 2516), HuH-7D12 (ECACC 01042712), 293 (ATCC CRL 10852), A549 (ATCC CCL 185), IMR-90 (ATCC CCL 186), MCF-7 (ATC HTB-22), U-2 OS (ATCC HTB-96), and T84 (ATCC CCL 248), or any cell available at American Type Culture Collection (ATCC), or any combination thereof.

[0260] Organisms that can be transgenic can include bacteria, archaea, single-cell eukaryotes, plants, algae, fungi (e.g., yeast), invertebrates (e.g., fruit fly, cnidarian, echinoderm, nematode, etc), vertebrates (e.g., fish, amphibian, reptile, bird, mammal), mammals (e.g., a pig, a cow, a goat, a sheep, a rodent, a rat, a mouse, a non-human primate, a human, etc.), etc.

[0261] Transgenic organisms can comprise genetically modified cells. Transgenic organisms and/or genetically modified cells can comprise organisms and/or cells that have been genetically modified with an exogenous nucleic acid comprising a nucleotide sequence encoding nucleic acid-targeting nucleic acid of the disclosure, an effector protein, and/or a site-directed polypeptide, or any combination thereof.

[0262] A genetically modified cell can comprise an exogenous site-directed polypeptide and/or an exogenous nucleic acid comprising a nucleotide sequence encoding a site-directed polypeptide. Expression of the site-directed polypeptide in the cell may take 0.1, 0.2, 0.5, 1, 2, 3, 4, 5, 6, or more days. Cells, introduced with the site-directed polypeptide, may be grown for 0.1, 0.2, 0.5, 1, 2, 3, 4, 5, 6, 7, 8, 9, 10 or even more days before the cells can be removed from cell culture and/or host organism.

[0263] Subjects

[0264] The disclosure provides for performing the methods of the disclosure in a subject. A subject can be a human. A subject can be a mammal (e.g., rat, mouse, cow, dog, pig, sheep, horse). A subject can be a vertebrate or an invertebrate. A subject can be a laboratory animal. A subject can be a patient. A subject can be suffering from a disease. A subject can display symptoms of a disease. A subject may not display symptoms of a disease, but still have a disease. A subject can be under medical care of a caregiver (e.g., the subject is hospitalized and is treated by a physician). A subject can be a plant or a crop.

[0265] Kits

[0266] The present disclosure provides kits for carrying out the methods of the disclosure. A kit can include one or more of: A nucleic acid-targeting nucleic acid of the disclosure, a polynucleotide encoding a nucleic acid-targeting nucleic acid, a site-directed polypeptide of the disclosure, a polynucleotide encoding a site-directed polypeptide, a donor polynucleotide, and/or any nucleic acid or proteinaceous molecule necessary to carry out the embodiments of the methods of the disclosure, or any combination thereof.

[0267] A nucleic acid-targeting nucleic acid of the disclosure, a polynucleotide encoding a nucleic acid-targeting nucleic acid, a site-directed polypeptide of the disclosure, a polynucleotide encoding a site-directed polypeptide, a donor polynucleotide, and/or any nucleic acid or proteinaceous molecule necessary to carry out the embodiments of the methods of the disclosure are described in detail above.

[0268] A kit can comprise: (1) a vector comprising a nucleotide sequence encoding a nucleic acid-targeting nucleic acid of the disclosure, and (2) a vector comprising a nucleotide sequence encoding the site-directed polypeptide of the disclosure and (2) a reagent for reconstitution and/or dilution of the vectors.

[0269] A kit can comprise: (1) a vector comprising (i) a nucleotide sequence encoding a nucleic acid-targeting nucleic acid of the disclosure, and (ii) a nucleotide sequence encoding the site-directed polypeptide of the disclosure and (2) a reagent for reconstitution and/or dilution of the vector.

[0270] A kit can comprise: (1) a vector comprising a nucleotide sequence encoding a nucleic acid-targeting nucleic acid of the disclosure, (2) a vector comprising a nucleotide sequence encoding the site-directed polypeptide of the disclosure, (3) a vector comprising a nucleotide sequence encoding a donor polynucleotide, and/or any nucleic acid or proteinaceous molecule necessary to carry out the embodiments of the methods of the disclosure, and (4) a reagent for reconstitution and/or dilution of the vectors.

[0271] A kit can comprise: (1) a vector comprising (i) a nucleotide sequence encoding a nucleic acid-targeting nucleic acid of the disclosure, (ii) a nucleotide sequence encoding the site-directed polypeptide of the disclosure, (2) a vector comprising a nucleotide sequence encoding a donor polynucleotide, and/or any nucleic acid or proteinaceous molecule necessary to carry out the embodiments of the methods of the disclosure, and (3) a reagent for reconstitution and/or dilution of the recombinant expression vectors.

[0272] In some embodiments of any of the above kits, the kit can comprise a single guide nucleic acid-targeting nucleic acid. In some embodiments of any of the above kits, the kit can comprise a double guide nucleic acid-targeting nucleic acid. In some embodiments of any of the above kits, the kit can comprise two or more double guide or single guide nucleic acid-targeting nucleic acids. In some embodiments, a vector may encode for a nucleic acid targeting nucleic acid.

[0273] In some embodiments of any of the above kits, the kit can further comprise a donor polynucleotide, or a polynucleotide sequence encoding the donor polynucleotide, to effect the desired genetic modification. Components of a kit can be in separate containers; or can be combined in a single container.

[0274] A kit described above further comprise one or more additional reagents, where such additional reagents can be selected from: a buffer, a buffer for introducing the a polypeptide or polynucleotide item of the kit into a cell, a wash buffer, a control reagent, a control vector, a control RNA polynucleotide, a reagent for in vitro production of the polypeptide from DNA, adaptors for sequencing and the like. A buffer can be a stabilization buffer, a reconstituting buffer, or a diluting buffer.

[0275] In some instances, a kit can comprise one or more additional reagents specific for plants and/or fungi. One or more additional reagents for plants and/or fungi can include, for example, soil, nutrients, plants, seeds, spores, Agrobacterium, T-DNA vector, and a pBINAR vector.

[0276] In addition to above-mentioned components, a kit can further include instructions for using the components of the kit to practice the methods. The instructions for practicing the methods are generally recorded on a suitable recording medium. For example, the instructions may be printed on a substrate, such as paper or plastic, etc. The instructions may be present in the kits as a package insert, in the labeling of the container of the kit or components thereof (i.e., associated with the packaging or subpackaging) etc. The instructions can be present as an electronic storage data file present on a suitable computer readable storage medium, e.g. CD-ROM, diskette, flash drive, etc. In some instances, the actual instructions are not present in the kit, but means for obtaining the instructions from a remote source (e.g. via the Internet), can be provided. An example of this embodiment is a kit that includes a web address where the instructions can be viewed and/or from which the instructions can be downloaded. As with the instructions, this means for obtaining the instructions can be recorded on a suitable substrate.

[0277] Pharmaceutical Compositions

[0278] Molecules, such as a nucleic acid-targeting nucleic acid of the disclosure as described herein, a polynucleotide encoding a nucleic acid-targeting nucleic acid, a site-directed polypeptide of the disclosure, a polynucleotide encoding a site-directed polypeptide, a donor polynucleotide, and/or any nucleic acid or proteinaceous molecule necessary to carry out the embodiments of the methods of the disclosure, can be formulated in a pharmaceutical composition.

[0279] A pharmaceutical composition can comprise a combination of any molecules described herein with other chemical components, such as carriers, stabilizers, diluents, dispersing agents, suspending agents, thickening agents, and/or excipients. The pharmaceutical composition can facilitate administration of the molecule to an organism. Pharmaceutical compositions can be administered in therapeutically-effective amounts as pharmaceutical compositions by various forms and routes including, for example, intravenous, subcutaneous, intramuscular, oral, rectal, aerosol, parenteral, ophthalmic, pulmonary, transdermal, vaginal, otic, nasal, and topical administration.

[0280] A pharmaceutical composition can be administered in a local or systemic manner, for example, via injection of the molecule directly into an organ, optionally in a depot or sustained release formulation. Pharmaceutical compositions can be provided in the form of a rapid release formulation, in the form of an extended release formulation, or in the form of an intermediate release formulation. A rapid release form can provide an immediate release. An extended release formulation can provide a controlled release or a sustained delayed release.

[0281] For oral administration, pharmaceutical compositions can be formulated readily by combining the molecules with pharmaceutically-acceptable carriers or excipients. Such carriers can be used to formulate tablets, powders, pills, dragees, capsules, liquids, gels, syrups, elixirs, slurries, suspensions and the like, for oral ingestion by a subject.

[0282] Pharmaceutical preparations for oral use can be obtained by mixing one or more solid excipient with one or more of the molecules described herein, optionally grinding the resulting mixture, and processing the mixture of granules, after adding suitable auxiliaries, if desired, to obtain tablets or dragee cores. Cores can be provided with suitable coatings. For this purpose, concentrated sugar solutions can be used, which can contain an excipient such as gum arabic, talc, polyvinylpyrrolidone, carbopol gel, polyethylene glycol, and/or titanium dioxide, lacquer solutions, and suitable organic solvents or solvent mixtures. Dyestuffs or pigments can be added to the tablets or dragee coatings, for example, for identification or to characterize different combinations of active compound doses.

[0283] Pharmaceutical preparations which can be used orally can include push-fit capsules made of gelatin, as well as soft, sealed capsules made of gelatin and a plasticizer, such as glycerol or sorbitol. In some embodiments, the capsule comprises a hard gelatin capsule comprising one or more of pharmaceutical, bovine, and plant gelatins. A gelatin can be alkaline-processed. The push-fit capsules can comprise the active ingredients in admixture with filler such as lactose, binders such as starches, and/or lubricants such as talc or magnesium stearate and, stabilizers. In soft capsules, the molecule can be dissolved or suspended in suitable liquids, such as fatty oils, liquid paraffin, or liquid polyethylene glycols. Stabilizers can be added. All formulations for oral administration are provided in dosages suitable for such administration.

[0284] For buccal or sublingual administration, the compositions can be tablets, lozenges, or gels.

[0285] Parental injections can be formulated for bolus injection or continuous infusion. The pharmaceutical compositions can be in a form suitable for parenteral injection as a sterile suspension, solution or emulsion in oily or aqueous vehicles, and can contain formulatory agents such as suspending, stabilizing and/or dispersing agents. Pharmaceutical formulations for parenteral administration can include aqueous solutions of the active compounds in water-soluble form.

[0286] Suspensions of molecules can be prepared as oily injection suspensions. Suitable lipophilic solvents or vehicles include fatty oils such as sesame oil, or synthetic fatty acid esters, such as ethyl oleate or triglycerides, or liposomes. Aqueous injection suspensions can contain substances which increase the viscosity of the suspension, such as sodium carboxymethyl cellulose, sorbitol, or dextran. The suspension can also contain suitable stabilizers or agents which increase the solubility of the molecules to allow for the preparation of highly concentrated solutions. Alternatively, the active ingredient can be in powder form for constitution with a suitable vehicle, e.g., sterile pyrogen-free water, before use.

[0287] The active compounds can be administered topically and can be formulated into a variety of topically administrable compositions, such as solutions, suspensions, lotions, gels, pastes, medicated sticks, balms, creams, and ointments. Such pharmaceutical compositions can comprise solubilizers, stabilizers, tonicity enhancing agents, buffers and preservatives.

[0288] Formulations suitable for transdermal administration of the molecules can employ transdermal delivery devices and transdermal delivery patches, and can be lipophilic emulsions or buffered aqueous solutions, dissolved and/or dispersed in a polymer or an adhesive. Such patches can be constructed for continuous, pulsatile, or on demand delivery of molecules. Transdermal delivery can be accomplished by means of iontophoretic patches and the like. Additionally, transdermal patches can provide controlled delivery. The rate of absorption can be slowed by using rate-controlling membranes or by trapping the compound within a polymer matrix or gel. Conversely, absorption enhancers can be used to increase absorption. An absorption enhancer or carrier can include absorbable pharmaceutically acceptable solvents to assist passage through the skin. For example, transdermal devices can be in the form of a bandage comprising a backing member, a reservoir containing compounds and carriers, a rate controlling barrier to deliver the compounds to the skin of the subject at a controlled and predetermined rate over a prolonged period of time, and adhesives to secure the device to the skin.

[0289] For administration by inhalation, the molecule can be in a form as an aerosol, a mist, or a powder. Pharmaceutical compositions can be delivered in the form of an aerosol spray presentation from pressurized packs or a nebuliser, with the use of a suitable propellant, for example, dichlorodifluoromethane, trichlorofluoromethane, dichlorotetrafluoroethane, carbon dioxide or other suitable gas. In the case of a pressurized aerosol, the dosage unit can be determined by providing a valve to deliver a metered amount. Capsules and cartridges of, for example, gelatin for use in an inhaler or insufflator can be formulated containing a powder mix of the compounds and a suitable powder base such as lactose or starch.

[0290] The molecules can also be formulated in rectal compositions such as enemas, rectal gels, rectal foams, rectal aerosols, suppositories, jelly suppositories, or retention enemas, containing conventional suppository bases such as cocoa butter or other glycerides, as well as synthetic polymers such as polyvinylpyrrolidone and PEG. In suppository forms of the compositions, a low-melting wax such as a mixture of fatty acid glycerides or cocoa butter can be used.

[0291] In practicing the methods of the disclosure, therapeutically-effective amounts of the compounds described herein can be administered in pharmaceutical compositions to a subject having a disease or condition to be treated. A therapeutically-effective amount can vary widely depending on the severity of the disease, the age and relative health of the subject, the potency of the compounds used, and other factors. The compounds can be used singly or in combination with one or more therapeutic agents as components of mixtures.

[0292] Pharmaceutical compositions can be formulated using one or more physiologically-acceptable carriers comprising excipients and auxiliaries, which facilitate processing of the molecule into preparations that can be used pharmaceutically. Formulation can be modified depending upon the route of administration chosen. Pharmaceutical compositions comprising a molecule described herein can be manufactured, for example, by mixing, dissolving, granulating, dragee-making, levigating, emulsifying, encapsulating, entrapping, or compression processes.

[0293] The pharmaceutical compositions can include at least one pharmaceutically acceptable carrier, diluent, or excipient and molecule described herein as free-base or pharmaceutically-acceptable salt form. The methods and pharmaceutical compositions described herein include the use crystalline forms (also known as polymorphs), and active metabolites of these compounds having the same type of activity.

[0294] Methods for the preparation of compositions comprising the compounds described herein can include formulating the molecule with one or more inert, pharmaceutically-acceptable excipients or carriers to form a solid, semi-solid, or liquid composition. Solid compositions can include, for example, powders, tablets, dispersible granules, capsules, cachets, and suppositories. Liquid compositions can include, for example, solutions in which a compound is dissolved, emulsions comprising a compound, or a solution containing liposomes, micelles, or nanoparticles comprising a compound as disclosed herein. Semi-solid compositions can include, for example, gels, suspensions and creams. The compositions can be in liquid solutions or suspensions, solid forms suitable for solution or suspension in a liquid prior to use, or as emulsions. These compositions can also contain minor amounts of nontoxic, auxiliary substances, such as wetting or emulsifying agents, pH buffering agents, and other pharmaceutically-acceptable additives.

[0295] Non-limiting examples of dosage forms can include feed, food, pellet, lozenge, liquid, elixir, aerosol, inhalant, spray, powder, tablet, pill, capsule, gel, geltab, nanosuspension, nanoparticle, microgel, suppository troches, aqueous or oily suspensions, ointment, patch, lotion, dentifrice, emulsion, creams, drops, dispersible powders or granules, emulsion in hard or soft gel capsules, syrups, phytoceuticals, and nutraceuticals, or any combination thereof.

[0296] Non-limiting examples of pharmaceutically-acceptable excipients can include granulating agents, binding agents, lubricating agents, disintegrating agents, sweetening agents, glidants, anti-adherents, anti-static agents, surfactants, anti-oxidants, gums, coating agents, coloring agents, flavouring agents, coating agents, plasticizers, preservatives, suspending agents, emulsifying agents, plant cellulosic material, and spheronization agents, or any combination thereof.

[0297] A composition can be, for example, an immediate release form or a controlled release formulation. An immediate release formulation can be formulated to allow the molecules to act rapidly. Non-limiting examples of immediate release formulations can include readily dissolvable formulations. A controlled release formulation can be a pharmaceutical formulation that has been adapted such that drug release rates and drug release profiles can be matched to physiological and chronotherapeutic requirements or, alternatively, has been formulated to effect release of a drug at a programmed rate. Non-limiting examples of controlled release formulations can include granules, delayed release granules, hydrogels (e.g., of synthetic or natural origin), other gelling agents (e.g., gel-forming dietary fibers), matrix-based formulations (e.g., formulations comprising a polymeric material having at least one active ingredient dispersed through), granules within a matrix, polymeric mixtures, granular masses, and the like.

[0298] A controlled release formulation can be a delayed release form. A delayed release form can be formulated to delay a molecule's action for an extended period of time. A delayed release form can be formulated to delay the release of an effective dose of one or more molecules, for example, for about 4, about 8, about 12, about 16, or about 24 hours.

[0299] A controlled release formulation can be a sustained release form. A sustained release form can be formulated to sustain, for example, the molecule's action over an extended period of time. A sustained release form can be formulated to provide an effective dose of any molecule described herein (e.g., provide a physiologically-effective blood profile) over about 4, about 8, about 12, about 16 or about 24 hours.

[0300] Methods of Administration and Treatment Methods.

[0301] Pharmaceutical compositions containing molecules described herein can be administered for prophylactic and/or therapeutic treatments. In therapeutic applications, the compositions can be administered to a subject already suffering from a disease or condition, in an amount sufficient to cure or at least partially arrest the symptoms of the disease or condition, or to cure, heal, improve, or ameliorate the condition. Amounts effective for this use can vary based on the severity and course of the disease or condition, previous therapy, the subject's health status, weight, and response to the drugs, and the judgment of the treating physician.

[0302] Multiple therapeutic agents can be administered in any order or simultaneously. If simultaneously, the multiple therapeutic agents can be provided in a single, unified form, or in multiple forms, for example, as multiple separate pills. The molecules can be packed together or separately, in a single package or in a plurality of packages. One or all of the therapeutic agents can be given in multiple doses. If not simultaneous, the timing between the multiple doses may vary to as much as about a month.

[0303] Molecules described herein can be administered before, during, or after the occurrence of a disease or condition, and the timing of administering the composition containing a compound can vary. For example, the pharmaceutical compositions can be used as a prophylactic and can be administered continuously to subjects with a propensity to conditions or diseases in order to prevent the occurrence of the disease or condition. The molecules and pharmaceutical compositions can be administered to a subject during or as soon as possible after the onset of the symptoms. The administration of the molecules can be initiated within the first 48 hours of the onset of the symptoms, within the first 24 hours of the onset of the symptoms, within the first 6 hours of the onset of the symptoms, or within 3 hours of the onset of the symptoms. The initial administration can be via any route practical, such as by any route described herein using any formulation described herein. A molecule can be administered as soon as is practicable after the onset of a disease or condition is detected or suspected, and for a length of time necessary for the treatment of the disease, such as, for example, from about 1 month to about 3 months. The length of treatment can vary for each subject.

[0304] A molecule can be packaged into a biological compartment. A biological compartment comprising the molecule can be administered to a subject. Biological compartments can include, but are not limited to, viruses (lentivirus, adenovirus), nanospheres, liposomes, quantum dots, nanoparticles, microparticles, nanocapsules, vesicles, polyethylene glycol particles, hydrogels, and micelles.

[0305] For example, a biological compartment can comprise a liposome. A liposome can be a self-assembling structure comprising one or more lipid bilayers, each of which can comprise two monolayers containing oppositely oriented amphipathic lipid molecules. Amphipathic lipids can comprise a polar (hydrophilic) headgroup covalently linked to one or two or more non-polar (hydrophobic) acyl or alkyl chains. Energetically unfavorable contacts between the hydrophobic acyl chains and a surrounding aqueous medium induce amphipathic lipid molecules to arrange themselves such that polar headgroups can be oriented towards the bilayer's surface and acyl chains are oriented towards the interior of the bilayer, effectively shielding the acyl chains from contact with the aqueous environment.

[0306] Examples of preferred amphipathic compounds used in liposomes can include phosphoglycerides and sphingolipids, representative examples of which include phosphatidylcholine, phosphatidylethanolamine, phosphatidylserine, phosphatidylinositol, phosphatidic acid, phoasphatidylglycerol, palmitoyloleoyl phosphatidylcholine, lysophosphatidylcholine, lysophosphatidylethanolamine, dimyristoylphosphatidylcholine (DMPC), dipalmitoylphosphatidylcholine (DPPC), dioleoylphosphatidylcholine, distearoylphosphatidylcholine (DSPC), dilinoleoylphosphatidylcholine and egg sphingomyelin, or any combination thereof.

[0307] A biological compartment can comprise a nanoparticle. A nanoparticle can comprise a diameter of from about 40 nanometers to about 1.5 micrometers, from about 50 nanometers to about 1.2 micrometers, from about 60 nanometers to about 1 micrometer, from about 70 nanometers to about 800 nanometers, from about 80 nanometers to about 600 nanometers, from about 90 nanometers to about 400 nanometers, from about 100 nanometers to about 200 nanometers.

[0308] In some instances, as the size of the nanoparticle increases, the release rate can be slowed or prolonged and as the size of the nanoparticle decreases, the release rate can be increased.

[0309] The amount of albumin in the nanoparticles can range from about 5% to about 85% albumin (v/v), from about 10% to about 80%, from about 15% to about 80%, from about 20% to about 70% albumin (v/v), from about 25% to about 60%, from about 30% to about 50%, or from about 35% to about 40%. The pharmaceutical composition can comprise up to 30, 40, 50, 60, 70 or 80% or more of the nanoparticle. In some instances, the nucleic acid molecules of the disclosure can be bound to the surface of the nanoparticle.

[0310] A biological compartment can comprise a virus. The virus can be a delivery system for the pharmaceutical compositions of the disclosure. Exemplary viruses can include lentivirus, retrovirus, adenovirus, herpes simplex virus I or II, parvovirus, reticuloendotheliosis virus, and adeno-associated virus (AAV). Pharmaceutical compositions of the disclosure can be delivered to a cell using a virus. The virus can infect and transduce the cell in vivo, ex vivo, or in vitro. In ex vivo and in vitro delivery, the transduced cells can be administered to a subject in need of therapy.

[0311] Pharmaceutical compositions can be packaged into viral delivery systems. For example, the compositions can be packaged into virions by a HSV-1 helper virus-free packaging system.

[0312] Viral delivery systems (e.g., viruses comprising the pharmaceutical compositions of the disclosure) can be administered by direct injection, stereotaxic injection, intracerebroventricularly, by minipump infusion systems, by convection, catheters, intravenous, parenteral, intraperitoneal, and/or subcutaneous injection, to a cell, tissue, or organ of a subject in need. In some instances, cells can be transduced in vitro or ex vivo with viral delivery systems. The transduced cells can be administered to a subject having a disease. For example, a stem cell can be transduced with a viral delivery system comprising a pharmaceutical composition and the stem cell can be implanted in the patient to treat a disease. In some instances, the dose of transduced cells given to a subject can be about 1×10⁵ cells/kg, about 5×10⁵ cells/kg, about 1×10⁶ cells/kg, about 2×10⁶ cells/kg, about 3×10⁶ cells/kg, about 4×10⁶ cells/kg, about 5×10⁶ cells/kg, about 6×10⁶ cells/kg, about 7×10⁶ cells/kg, about 8×10⁶ cells/kg, about 9×10⁶ cells/kg, about 1×10⁷ cells/kg, about 5×10⁷ cells/kg, about 1×10⁸ cells/kg, or more in one single dose.

[0313] Pharmaceutical compositions in biological compartments can be used to treat inflammatory diseases such as arthritis, cancers, such as, for example, bone cancer, breast cancer, skin cancer, prostate cancer, liver cancer, lung cancer, throat cancer and kidney cancer, bacterial infections, to treat nerve damage, lung, liver and kidney diseases, eye treatment, spinal cord injuries, heart disease, arterial disease.

[0314] Introduction of the biological compartments into cells can occur by viral or bacteriophage infection, transfection, conjugation, protoplast fusion, lipofection, electroporation, calcium phosphate precipitation, polyethyleneimine (PEI)-mediated transfection, DEAE-dextran mediated transfection, liposome-mediated transfection, particle gun technology, calcium phosphate precipitation, direct micro-injection, nanoparticle-mediated nucleic acid delivery, and the like.

[0315] Dosage

[0316] Pharmaceutical compositions described herein can be in unit dosage forms suitable for single administration of precise dosages. In unit dosage form, the formulation can be divided into unit doses containing appropriate quantities of one or more compounds. The unit dosage can be in the form of a package containing discrete quantities of the formulation. Non-limiting examples can include packaged tablets or capsules, and powders in vials or ampoules. Aqueous suspension compositions can be packaged in single-dose non-reclosable containers. Multiple-dose reclosable containers can be used, for example, in combination with a preservative. Formulations for parenteral injection can be presented in unit dosage form, for example, in ampoules, or in multi-dose containers with a preservative.

[0317] A molecule described herein can be present in a composition in a range of from about 1 mg to about 2000 mg; from about 5 mg to about 1000 mg, from about 10 mg to about 25 mg to 500 mg, from about 50 mg to about 250 mg, from about 100 mg to about 200 mg, from about 1 mg to about 50 mg, from about 50 mg to about 100 mg, from about 100 mg to about 150 mg, from about 150 mg to about 200 mg, from about 200 mg to about 250 mg, from about 250 mg to about 300 mg, from about 300 mg to about 350 mg, from about 350 mg to about 400 mg, from about 400 mg to about 450 mg, from about 450 mg to about 500 mg, from about 500 mg to about 550 mg, from about 550 mg to about 600 mg, from about 600 mg to about 650 mg, from about 650 mg to about 700 mg, from about 700 mg to about 750 mg, from about 750 mg to about 800 mg, from about 800 mg to about 850 mg, from about 850 mg to about 900 mg, from about 900 mg to about 950 mg, or from about 950 mg to about 1000 mg.

[0318] A molecule described herein can be present in a composition in an amount of about 1 mg, about 2 mg, about 3 mg, about 4 mg, about 5 mg, about 10 mg, about 15 mg, about 20 mg, about 25 mg, about 30 mg, about 35 mg, about 40 mg, about 45 mg, about 50 mg, about 55 mg, about 60 mg, about 65 mg, about 70 mg, about 75 mg, about 80 mg, about 85 mg, about 90 mg, about 95 mg, about 100 mg, about 125 mg, about 150 mg, about 175 mg, about 200 mg, about 250 mg, about 300 mg, about 350 mg, about 400 mg, about 450 mg, about 500 mg, about 550 mg, about 600 mg, about 650 mg, about 700 mg, about 750 mg, about 800 mg, about 850 mg, about 900 mg, about 950 mg, about 1000 mg, about 1050 mg, about 1100 mg, about 1150 mg, about 1200 mg, about 1250 mg, about 1300 mg, about 1350 mg, about 1400 mg, about 1450 mg, about 1500 mg, about 1550 mg, about 1600 mg, about 1650 mg, about 1700 mg, about 1750 mg, about 1800 mg, about 1850 mg, about 1900 mg, about 1950 mg, or about 2000 mg.

[0319] A molecule (e.g., site-directed polypeptide, nucleic acid-targeting nucleic acid and/or complex of a site-directed polypeptide and a nucleic acid-targeting nucleic acid) described herein can be present in a composition that provides at least 0.1, 0.5, 1, 1.5, 2, 2.5 3, 3.5, 4, 4.5, 5, 5.5, 6, 6.5, 10 or more units of activity/mg molecule. In some embodiments, the total number of units of activity of the molecule delivered to a subject is at least 25,000, 30,000, 35,000, 40,000, 45,000, 50,000, 60,000, 70,000, 80,000, 90,000, 110,000, 120,000, 130,000, 140,000, 150,000, 160,000, 170,000, 180,000, 190,000, 200,000, 210,000, 220,000, 230,000, or 250,000 or more units. In some embodiments, the total number of units of activity of the molecule delivered to a subject is at most 25,000, 30,000, 35,000, 40,000, 45,000, 50,000, 60,000, 70,000, 80,000, 90,000, 110,000, 120,000, 130,000, 140,000, 150,000, 160,000, 170,000, 180,000, 190,000, 200,000, 210,000, 220,000, 230,000, or 250,000 or more units.

[0320] In some embodiments, at least about 10,000 units of activity is delivered to a subject, normalized per 50 kg body weight. In some embodiments, at least about 10,000, 15,000, 25,000, 30,000, 35,000, 40,000, 45,000, 50,000, 60,000, 70,000, 80,000, 90,000, 110,000, 120,000, 130,000, 140,000, 150,000, 160,000, 170,000, 180,000, 190,000, 200,000, 210,000, 220,000, 230,000, or 250,000 units or more of activity of the molecule is delivered to the subject, normalized per 50 kg body weight. In some embodiments, a therapeutically effective dose comprises at least 5×10⁵, 1×10⁶, 2×10⁶, 3×10⁶, 4, 10⁶, 5×10⁶, 6×10⁶, 7×10⁶, 8×10⁶, 9×10⁶, 1×10⁷, 1.1×10⁷, 1.2×10⁷, 1.5×10⁷, 1.6×10⁷, 1.7×10⁷, 1.8×10⁷, 1.9×10⁷, 2×10⁷, 2.1×10⁷, or 3×10⁷ or more units of activity of the molecule. In some embodiments, a therapeutically effective dose comprises at most 5×10⁵ 1×10⁶, 2×10⁶, 3×10⁶, 4, 10⁶, 5×10⁶, 6×10⁶, 7×10⁶, 8×10⁶, 9×10⁶, 1×10⁷, 1.1×10⁷, 1.2×10⁷, 1.5×10⁷, 1.6×10⁷, 1.7×10⁷, 1.8×10⁷, 1.9×10⁷, 2 x 10⁷, 2.1×10⁷, or 3×10⁷or more units of activity of the molecule.

[0321] In some embodiments, a therapeutically effective dose is at least about 10,000, 15,000, 20,000, 22,000, 24,000, 25,000, 30,000, 40,000, 50,000, 60,000, 70,000, 80,000, 90,000, 100,000, 125,000, 150,000, 200,000, or 500,000 units/kg body weight. In some embodiments, a therapeutically effective dose is at most about 10,000, 15,000, 20,000, 22,000, 24,000, 25,000, 30,000, 40,000, 50,000, 60,000, 70,000, 80,000, 90,000, 100,000, 125,000, 150,000, 200,000, or 500,000 units/kg body weight.

[0322] In some embodiments, the activity of the molecule delivered to a subject is at least 10,000, 11,000, 12,000, 13,000, 14,000, 20,000, 21,000, 22,000, 23,000, 24,000, 25,000, 26,000, 27,000, 28,000, 30,000, 32,000, 34,000, 35,000, 36,000, 37,000, 40,000, 45,000, or 50,000 or more U/mg of molecule. In some embodiments, the activity of the molecule delivered to a subject is at most 10,000, 11,000, 12,000, 13,000, 14,000, 20,000, 21,000, 22,000, 23,000, 24,000, 25,000, 26,000, 27,000, 28,000, 30,000, 32,000, 34,000, 35,000, 36,000, 37,000, 40,000, 45,000, or 50,000 or more U/mg of molecule.

[0323] Pharmacokinetic and Pharmacodynamic Measurements

[0324] Pharmacokinetic and pharmacodynamic data can be obtained by various experimental techniques. Appropriate pharmacokinetic and pharmacodynamic profile components describing a particular composition can vary due to variations in drug metabolism in human subjects. Pharmacokinetic and pharmacodynamic profiles can be based on the determination of the mean parameters of a group of subjects. The group of subjects includes any reasonable number of subjects suitable for determining a representative mean, for example, 5 subjects, 10 subjects, 15 subjects, 20 subjects, 25 subjects, 30 subjects, 35 subjects, or more. The mean can be determined by calculating the average of all subject's measurements for each parameter measured. A dose can be modulated to achieve a desired pharmacokinetic or pharmacodynamics profile, such as a desired or effective blood profile, as described herein.

[0325] The pharmacokinetic parameters can be any parameters suitable for describing a molecule. For example, the Cₘₐₓ can be, for example, not less than about 25 ng/mL; not less than about 50 ng/mL; not less than about 75 ng/mL; not less than about 100 ng/mL; not less than about 200 ng/mL; not less than about 300 ng/mL; not less than about 400 ng/mL; not less than about 500 ng/mL; not less than about 600 ng/mL; not less than about 700 ng/mL; not less than about 800 ng/mL; not less than about 900 ng/mL; not less than about 1000 ng/mL; not less than about 1250 ng/mL; not less than about 1500 ng/mL; not less than about 1750 ng/mL; not less than about 2000 ng/mL; or any other Cₘₐₓ appropriate for describing a pharmacokinetic profile of a molecule described herein.

[0326] The Tₘₐₓ of a molecule described herein can be, for example, not greater than about 0.5 hours, not greater than about 1 hours, not greater than about 1.5 hours, not greater than about 2 hours, not greater than about 2.5 hours, not greater than about 3 hours, not greater than about 3.5 hours, not greater than about 4 hours, not greater than about 4.5 hours, not greater than about 5 hours, or any other Tₘₐₓ appropriate for describing a pharmacokinetic profile of a molecule described herein.

[0327] The AUC_{(0-inf)} of a molecule described herein can be, for example, not less than about 50 ng·hr/mL, not less than about 100 ng/hr/mL, not less than about 150 ng/hr/mL, not less than about 200 ng·hr/mL, not less than about 250 ng/hr/mL, not less than about 300 ng/hr/mL, not less than about 350 ng/hr/mL, not less than about 400 ng/hr/mL, not less than about 450 ng/hr/mL, not less than about 500 ng/hr/mL, not less than about 600 ng/hr/mL, not less than about 700 ng/hr/mL, not less than about 800 ng/hr/mL, not less than about 900 ng/hr/mL, not less than about 1000 ng·hr/mL, not less than about 1250 ng/hr/mL, not less than about 1500 ng/hr/mL, not less than about 1750 ng/hr/mL, not less than about 2000 ng/hr/mL, not less than about 2500 ng/hr/mL, not less than about 3000 ng/hr/mL, not less than about 3500 ng/hr/mL, not less than about 4000 ng/hr/mL, not less than about 5000 ng/hr/mL, not less than about 6000 ng/hr/mL, not less than about 7000 ng/hr/mL, not less than about 8000 ng/hr/mL, not less than about 9000 ng/hr/mL, not less than about 10,000 ng/hr/mL, or any other AUC_{(0-inf)} appropriate for describing a pharmacokinetic profile of a molecule described herein.

[0328] The plasma concentration of a molecule described herein about one hour after administration can be, for example, not less than about 25 ng/mL, not less than about 50 ng/mL, not less than about 75 ng/mL, not less than about 100 ng/mL, not less than about 150 ng/mL, not less than about 200 ng/mL, not less than about 300 ng/mL, not less than about 400 ng/mL, not less than about 500 ng/mL, not less than about 600 ng/mL, not less than about 700 ng/mL, not less than about 800 ng/mL, not less than about 900 ng/mL, not less than about 1000 ng/mL, not less than about 1200 ng/mL, or any other plasma concentration of a molecule described herein.

[0329] The pharmacodynamic parameters can be any parameters suitable for describing pharmaceutical compositions of the disclosure. For example, the pharmacodynamic profile can exhibit decreases in factors associated with inflammation after, for example, about 2 hours, about 4 hours, about 8 hours, about 12 hours, or about 24 hours.

[0330] Pharmaceutically-Acceptable Salts

[0331] The disclosure provides the use of pharmaceutically-acceptable salts of any molecule described herein. Pharmaceutically-acceptable salts can include, for example, acid-addition salts and base-addition salts. The acid that is added to the compound to form an acid-addition salt can be an organic acid or an inorganic acid. A base that is added to the compound to form a base-addition salt can be an organic base or an inorganic base. In some embodiments, a pharmaceutically-acceptable salt is a metal salt. In some embodiments, a pharmaceutically-acceptable salt is an ammonium salt.

[0332] Metal salts can arise from the addition of an inorganic base to a compound of the invention. The inorganic base consists of a metal cation paired with a basic counterion, such as, for example, hydroxide, carbonate, bicarbonate, or phosphate. The metal can be an alkali metal, alkaline earth metal, transition metal, or main group metal. In some embodiments, the metal is lithium, sodium, potassium, cesium, cerium, magnesium, manganese, iron, calcium, strontium, cobalt, titanium, aluminum, copper, cadmium, or zinc.

[0333] In some embodiments, a metal salt is a lithium salt, a sodium salt, a potassium salt, a cesium salt, a cerium salt, a magnesium salt, a manganese salt, an iron salt, a calcium salt, a strontium salt, a cobalt salt, a titanium salt, an aluminum salt, a copper salt, a cadmium salt, or a zinc salt, or any combination thereof.

[0334] Ammonium salts can arise from the addition of ammonia or an organic amine to a compound of the invention. In some embodiments, the organic amine is triethyl amine, diisopropyl amine, ethanol amine, diethanol amine, triethanol amine, morpholine, N-methylmorpholine, piperidine, N-methylpiperidine, N-ethylpiperidine, dibenzylamine, piperazine, pyridine, pyrrazole, pipyrrazole, imidazole, pyrazine, or pipyrazine, or any combination thereof.

[0335] In some embodiments, an ammonium salt is a triethyl amine salt, a diisopropyl amine salt, an ethanol amine salt, a diethanol amine salt, a triethanol amine salt, a morpholine salt, an N-methylmorpholine salt, a piperidine salt, an N-methylpiperidine salt, an N-ethylpiperidine salt, a dibenzylamine salt, a piperazine salt, a pyridine salt, a pyrrazole salt, a pipyrrazole salt, an imidazole salt, a pyrazine salt, or a pipyrazine salt, or any combination thereof.

[0336] Acid addition salts can arise from the addition of an acid to a molecule of the disclosure. In some embodiments, the acid is organic. In some embodiments, the acid is inorganic. In some embodiments, the acid is hydrochloric acid, hydrobromic acid, hydroiodic acid, nitric acid, nitrous acid, sulfuric acid, sulfurous acid, a phosphoric acid, isonicotinic acid, lactic acid, salicylic acid, tartaric acid, ascorbic acid, gentisinic acid, gluconic acid, glucaronic acid, saccaric acid, formic acid, benzoic acid, glutamic acid, pantothenic acid, acetic acid, propionic acid, butyric acid, fumaric acid, succinic acid, methanesulfonic acid, ethanesulfonic acid, benzenesulfonic acid, p-toluenesulfonic acid, citric acid, oxalic acid, or maleic acid, or any combination thereof.

[0337] In some embodiments, the salt is a hydrochloride salt, a hydrobromide salt, a hydroiodide salt, a nitrate salt, a nitrite salt, a sulfate salt, a sulfite salt, a phosphate salt, isonicotinate salt, a lactate salt, a salicylate salt, a tartrate salt, an ascorbate salt, a gentisinate salt, a gluconate salt, a glucaronate salt, a saccarate salt, a formate salt, a benzoate salt, a glutamate salt, a pantothenate salt, an acetate salt, a propionate salt, a butyrate salt, a fumarate salt, a succinate salt, a methanesulfonate salt, an ethanesulfonate salt, a benzenesulfonate salt, a p-toluenesulfonate salt, a citrate salt, an oxalate salt, or a maleate salt, or any combination thereof.

[0338] 3′ Engineered Nucleic Acid Targeting Nucleic Acids

[0339] The nucleic acid-targeting nucleic acids of the disclosure can be modified to delete the 3′ hairpin region. At least 5, 10, 15, 20, 25, 30, 35, 40, 45, 50, 55, 60, 65, 70, 75, 80, 85, 90, 95, or 100% of the 3′ hairpin regions can be deleted from the nucleic acid-targeting nucleic acid. At most 5, 10, 15, 20, 25, 30, 35, 40, 45, 50, 55, 60, 65, 70, 75, 80, 85, 90, 95, or 100% of the 3′ hairpin regions can be deleted from the nucleic acid-targeting nucleic acid. The first hairpin can be deleted from the nucleic acid-targeting nucleic acid. The second hairpin can be deleted from the nucleic acid-targeting nucleic acid. Both the first and second 3′ hairpins can be deleted from the nucleic acid-targeting nucleic acid from the nucleic acid-targeting nucleic acid.

[0340] A nucleic acid-targeting nucleic acid can be chemically synthesized. A nucleic acid-targeting nucleic acid with a deletion in the 3′ end can be chemically synthesized. Oligonucleotide synthesis can occur with solid phase chemistry (e.g., the phosphoramidite method). For example, a phosphoramidite can be reacted with a support-bound nucleotide, or oligonucleotide, in the presence of an activator. The phosphoroamidite coupling-product can be oxidized to afford a protected phosphate. An example of a phosphoramidite derivative is 1H-tetrazole. In some instances, oligonucleotide synthesis is performed in solution.

[0341] A 3′ engineered nucleic acid-targeting nucleic acid can bind a target nucleic acid with a greater or lesser binding constant than a wild-type nucleic acid-targeting nucleic acid (e.g., without a 3′ engineered deletion). A 3′ engineered nucleic acid-targeting nucleic acid can bind a target nucleic acid with at least 1-fold, 2-fold, 3-fold, 4-fold, 5-fold, 6-fold, 7-fold, 8-fold, 9-fold, or 10-fold or more greater or lesser binding affinity than a nucleic acid-targeting nucleic acid without a 3′ engineered deletion. A 3′ engineered nucleic acid-targeting nucleic acid can bind a target nucleic acid with at most 1-fold, 2-fold, 3-fold, 4-fold, 5-fold, 6-fold, 7-fold, 8-fold, 9-fold, or 10-fold or more greater or lesser binding affinity than a nucleic acid-targeting nucleic acid without a 3′ engineered deletion.

[0342] A 3′ engineered nucleic acid-targeting nucleic acid can reduce off-target binding compared to a nucleic acid-targeting nucleic acid without a 3′ engineered deletion. A 3′ engineered nucleic acid-targeting nucleic acid can reduce off-targeting binding by at least 1-fold, 2-fold, 3-fold, 4-fold, 5-fold, 6-fold, 7-fold, 8-fold, 9-fold, or 10-fold or more than an un-engineered nucleic acid-targeting nucleic acid with a 3′ engineered deletion. A 3′ engineered nucleic acid-targeting nucleic acid can reduce off-targeting binding by at most 1-fold, 2-fold, 3-fold, 4-fold, 5-fold, 6-fold, 7-fold, 8-fold, 9-fold, or 10-fold or more than an un-engineered nucleic acid-targeting nucleic acid with a 3′ engineered deletion.

[0343] FIG. 16 illustrates the activity of nucleic acid-targeting nucleic acids with either the first or second hairpin of the 3′tracrRNA sequence deleted. The activity assays were performed in an in vitro (biochemical) setting, or in vivo (cell-based) (T7E1).

[0344] Nucleic Acid-Targeting Nucleic Acids with an Engineered Loop and Nexus

[0345] The disclosure provides for nucleic acid-targeting nucleic acids with modifications to the loop and/or nexus region. An engineered nucleic acid-targeting nucleic acid can comprise a non-natural spacer and a natural nexus. An engineered nucleic acid-targeting nucleic acid can comprise a non-natural spacer and a non-natural nexus. An engineered nucleic acid-targeting nucleic acid can comprise a natural spacer and a non-natural nexus.

[0346] An engineered nexus can comprise at least 1, 2, 3, 4, 5, 6, 7, 8, 9, or 10 or more mutations. An engineered nexus can comprise at most 1, 2, 3, 4, 5, 6, 7, 8, 9, or 10 or more mutations. An engineered nexus can comprise at least 1, 2, 3, 4, 5, 6, 7, 8, 9, or 10 or more additional nucleotides inserted into the nexus. An engineered nexus can comprise at most 1, 2, 3, 4, 5, 6, 7, 8, 9, or 10 or more additional nucleotides inserted into the nexus. An engineered nexus can comprise at least 1, 2, 3, 4, 5, 6, 7, 8, 9, or 10 or more additional nucleotides deleted from the nexus. An engineered nexus can comprise at most 1, 2, 3, 4, 5, 6, 7, 8, 9, or 10 or more additional nucleotides deleted from the nexus.

[0347] An engineered nexus can comprise an engineered hairpin duplex. The engineered hairpin duplex can comprise at least 1, 2, 3, 4, 5, or more stacked base-paired nucleotides of the duplex. The engineered hairpin duplex can comprise at most 1, 2, 3, 4, 5, or more stacked base-paired nucleotides of the duplex.

[0348] An engineered nexus can comprise an engineered loop of the nexus. The engineered loop of the nexus can comprise at least 1, 2, 3, 4, 5, 6, 7, 8, 9, or 10 or more additional nucleotides. The engineered loop of the nexus can comprise at most 1, 2, 3, 4, 5, 6, 7, 8, 9, or 10 or more additional nucleotides.

[0349] An engineered loop can comprise at least 1, 2, 3, 4, 5, 6, 7, 8, 9, or 10 or more mutations. An engineered loop can comprise at most 1, 2, 3, 4, 5, 6, 7, 8, 9, or 10 or more mutations. An engineered loop can comprise at least 1, 2, 3, 4, 5, 6, 7, 8, 9, or 10 or more additional nucleotides inserted into the loop. An engineered nexus can comprise at most 1, 2, 3, 4, 5, 6, 7, 8, 9, or 10 or more additional nucleotides inserted into the v. An engineered loop can comprise at least 1, 2, 3, 4, 5, 6, 7, 8, 9, or 10 or more additional nucleotides deleted from the loop. An engineered loop can comprise at most 1, 2, 3, 4, 5, 6, 7, 8, 9, or 10 or more additional nucleotides deleted from the loop.

[0350] Generation of Libraries of Nucleic Acid-Targeting Nucleic Acids

[0351] In some embodiments, a library of nucleic acid-targeting nucleic acids can be generated which comprise different engineered backbones of nucleic acid-targeting nucleic acids. For example, a library of nucleic acid-targeting nucleic acids can comprise mutated nucleic acid-targeting nucleic acids in which each mutated nucleic acid-targeting nucleic acid can comprise a different mutation. The mutation can comprise at least 1, 2, 3, 4, 5, or more nucleotides. The mutation can comprise at most 1, 2, 3, 4, or 5 or more nucleotides.

[0352] The variants of the nucleic acid-targeting nucleic acids in the library can have variable nexus and/or loop regions of the nucleic acid-targeting nucleic acid. The variants can be tested for activity or effect of the variants in biochemical and cellular assays. FIG. 17 shows the activity of variants to the loop between the nexus and the first hairpin of the hairpin region (e.g., 3′ tracrRNA extension) both in vitro and in vivo. FIG. 18 shows the activity of variants to the nexus loop in vitro and in vivo. Sequences of variants used in these experiments are outlined in Table 5. FIG. 19 shows activity of nucleic acid-targeting nucleic acids engineered in the nexus region, for example, NX19 sgRNA variant.

[0353] The libraries can be screened for different parameters such as binding affinity, binding specificity, nucleic acid cleavage activity, homologous recombination activity, and the like.

[0354] Mutated nucleic acid-targeting nucleic acids of the library that are selected for an initial property can be further mutated, screened, and selected. Exemplary properties that can be selected for include binding affinity, structural conformation, stability, degradation, cleavage efficiency, and off-target binding. The process of selection can be repeated at least 2, 3, 4, 5, 6, 7, 8, 9, or 10 or more times. The process of selection can be repeated at most 2, 3, 4, 5, 6, 7, 8, 9, or 10 or more times. The process of selection can include, for example, SELEX, directed evolution, and combinatorial biochemistry.

[0355] Off-Target Nucleic Acids

[0356] The disclosure provides for methods and compositions for reducing off-targeting binding and/or cleavage of target nucleic acids. An off-target nucleic acid can refer to a nucleic acid that is not intended to be bound by a designed or a non-natural nucleic acid-targeting nucleic acid. An off-target region can refer to any region of a nucleic acid, for example, genomic DNA, that is not the target region. An off-target region can refer to any region of a nucleic acid, for example, genomic DNA, other than the target region. An off-target nucleic acid can be a nucleic acid with at least 1, 2, 3, 4, 5, 6, 7, 8, 9, or 10 or more mismatched nucleotides between the off-target nucleic acid and the spacer sequence of a nucleic acid-targeting nucleic acid. An off-target nucleic acid can be a nucleic acid with at most 1, 2, 3, 4, 5, 6, 7, 8, 9, or 10 or more mismatched nucleotides between the off-target nucleic acid and the spacer sequence of a nucleic acid-targeting nucleic acid.

[0357] In some embodiments, an off-target nucleic acid can be identical to a target nucleic acid except for, for example, from 1-5 nucleotide substitutions, mutations, and/or deletions compared to the target nucleic acid.

[0358] An off-target nucleic acid can be bound by a nucleic acid-targeting nucleic acid of the disclosure with a lower or higher affinity than a target nucleic acid. For example, an off-target nucleic acid can be bound by a nucleic acid-targeting nucleic acid with at least 1-fold, 2-fold, 3-fold, 4-fold, 5-fold, 6-fold, 7-fold, 8-fold, 9-fold, or 10-fold or more lower or higher affinity than a target nucleic acid. An off-target nucleic acid can be bound by a nucleic acid-targeting nucleic acid with at least 1-fold, 2-fold, 3-fold, 4-fold, 5-fold, 6-fold, 7-fold, 8-fold, 9-fold, or 10-fold or more lower or higher affinity than a target nucleic acid.

[0359] A nucleic acid-targeting nucleic acid can bind to an on-target or a set of one or more off-target nucleic acids. The set of off-target nucleic acids can be unique for the given nucleic acid-targeting nucleic acid. The off-target nucleic acid for a given nucleic acid-targeting nucleic acid may be the same as an off-target nucleic acid for a different nucleic acid-targeting nucleic acid. The off-target nucleic acid for a given nucleic acid-targeting nucleic acid may be different from an off-target nucleic acid for a different nucleic acid-targeting nucleic acid. The off-target nucleic acid for a given nucleic acid-targeting nucleic acid may overlap with an off-target nucleic acid for a different nucleic acid-targeting nucleic acid.

[0360] The percent complementarity between an off-target nucleic acid site and an on-target nucleic acid site can be at least about 1%, at least about 5%, at least about 10%, at least about 20%, at least about 30%, at least about 40%, at least about 50%, at least about 60%, at least about 70%, at least about 80%, at least about 90% or more. The percent complementarity between an off-target nucleic acid and a nucleic acid-targeting nucleic acid can be at most about 1%, at most about 5%, at most about 10%, at most about 20%, at most about 30%, at most about 40%, at most about 50%, at most about 60%, at most about 70%, at least most 80%, at most about 90% or more.

[0361] A nucleic acid-targeting nucleic acid can bind with more binding affinity to an on-target nucleic acid than to an off-target nucleic acid. A nucleic acid-targeting nucleic acid can bind with at least 10%, at least 20%, at least 30%, at least 40%, at least 50%, at least 60%, at least 70%, at least 80%, at least 90% or at least 100% more binding affinity to an on-target nucleic acid than to an off-target nucleic acid. A nucleic acid-targeting nucleic acid can bind with at most 10%, at most 20%, at most 30%, at most 40%, at most 50%, at most 60%, at most 70%, at most 80%, at most 90% or at most 100% more binding affinity to an on-target nucleic acid than to an off-target nucleic acid.

[0362] A nucleic acid-targeting nucleic acid can bind with less binding affinity to an off-target nucleic acid than to a target nucleic acid. A nucleic acid-targeting nucleic acid can bind with at least 10%, at least 20%, at least 30%, at least 40%, at least 50%, at least 60%, at least 70%, at least 80%, at least 90% or at least 100% less binding affinity to an off-target nucleic acid than to a target nucleic acid. A nucleic acid-targeting nucleic acid can bind with at most 10%, at most 20%, at most 30%, at most 40%, at most 50%, at most 60%, at most 70%, at most 80%, at most 90% or at most 100% less binding affinity to an off-target nucleic acid than to a target nucleic acid.

[0363] A complex comprising a site-directed polypeptide and a nucleic acid-targeting nucleic acid can bind with a greater or lesser binding constant to an off-target nucleic acid than to a target nucleic acid. An off-target nucleic acid can bind to a complex comprising a site-directed polypeptide and a nucleic acid-targeting nucleic acid with at least 1-fold, 2-fold, 3-fold, 4-fold, 5-fold, 6-fold, 7-fold, 8-fold, 9-fold, or 10-fold or more greater or lesser binding affinity than a target nucleic acid. An off-target nucleic acid can bind to a complex comprising a site-directed polypeptide and a nucleic acid-targeting nucleic acid with at most 1-fold, 2-fold, 3-fold, 4-fold, 5-fold, 6-fold, 7-fold, 8-fold, 9-fold, or 10-fold or more greater or lesser binding affinity than a target nucleic acid.

[0364] Off-Target Activity Measurement

[0365] The disclosure provides for methods for determining off-target activity (e.g. number of off-target nucleic acids for a given nucleic acid-targeting nucleic acid). Off-target activity can be determined by computational methods and/or experimental methods.

[0366] Computational methods can be used to determine an off-target nucleic acid for a given nucleic acid-targeting nucleic acid. Computational methods can comprise scanning the genomic sequence of a subject. The genomic sequence can be segmented in silico into a plurality of nucleic acid sequences. The segmented nucleic acid sequences can be aligned with the nucleic acid-targeting nucleic acid sequence. A sequence search algorithm can determine one or more off-target nucleic acid sequences by identifying segmented genomic sequences with alignments comprising a defined number of base-pair mismatches with the nucleic acid-targeting nucleic acid. The number of base-pair mismatches between a genomic sequence and a nucleic acid-targeting nucleic acid selected by an algorithm can be user-defined, for example, the algorithm can be programmed to identify off-target sequences with mismatches of up to five base pairs between the genomic sequence and the nucleic acid-targeting nucleic acid. In silico binding algorithms can be used to calculate binding and/or cleavage efficiency of each predicted off-target nucleic acid sequence by a site-directed polypeptide using a weighting scheme. This data can be used to calculate off-target activity for a given nucleic acid-targeting nucleic acid and/or site-directed polypeptide.

[0367] Off-target binding activity can be determined by experimental methods. The experimental methods can comprise sequencing a nucleic acid sample contacted by a complex comprising a site-directed polypeptide and a nucleic acid-targeting nucleic acid. The contacted nucleic acid sample can be fixed or crosslinked to stabilize protein-DNA complex. The complex comprising the site-directed polypeptide, the nucleic acid (e.g., target nucleic acid, off-target nucleic acid), and/or the nucleic acid-targeting nucleic acid can be captured from the nucleic acid sample with an affinity tag and/or capture agents. Nucleic acid purification techniques can be used to separate the target nucleic acid from the complex. Nucleic acid purification techniques can include spin column separation, precipitation, and electrophoresis. The nucleic acid can be prepared for sequencing analysis by shearing and ligation of adaptors. Preparation for sequencing analysis can include the generation of sequencing libraries of the eluted target nucleic acid.

[0368] Sequence determination methods can include but are not limited to pyrosequencing (for example, as commercialized by 454 Life Sciences, Inc., Branford, Conn.); sequencing by ligation (for example, as commercialized in the SOLiD™ technology, Life Technology, Inc., Carlsbad, Calif.); sequencing by synthesis using modified nucleotides (such as commercialized in TruSeqTm and HiSeg™ technology by Illumina, Inc., San Diego, Calif., HeliScope™ by Helicos Biosciences Corporation, Cambridge, Mass., and PacBio RS by Pacific Biosciences of California, Inc., Menlo Park, Calif.), sequencing by ion detection technologies (Ion Torrent, Inc., South San Francisco, Calif.); sequencing of DNA nanoballs (Complete Genomics, Inc., Mountain View, Calif.); nanopore-based sequencing technologies (for example, as developed by Oxford Nanopore Technologies, LTD, Oxford, UK), capillary sequencing (e.g, such as commercialized in MegaBACE by Molecular Dynamics), electronic sequencing, single molecule sequencing (e.g., such as commercialized in SMRT™ technology by Pacific Biosciences, Menlo Park, Calif.), droplet microfluidic sequencing, sequencing by hybridization (such as commercialized by Affymetrix, Santa Clara, Calif.), bisulfate sequencing, and other known highly parallelized sequencing methods. In some aspects, sequencing is performed by microarray analysis. Sequencing analysis can determine the identity and frequency of an off-target binding site for a given nucleic acid-targeting nucleic acid, by counting the number of times a particular binding site is read. The library of sequenced nucleic acids can include target nucleic acids and off-target nucleic acids.

[0369] 5′ Engineered Nucleic Acid-Targeting Nucleic Acids

[0370] Addition

[0371] A 5′ engineered nucleic acid-targeting nucleic acid can comprise 1, 2, 3, 4, 5, or more additional nucleotides on the 5′ end of the nucleic acid-targeting nucleic acid. The additional 5′ nucleotide can be located adjacent to the 5′ end of the spacer of the nucleic acid-targeting nucleic acid.

[0372] The 5′ engineered nucleic acid-targeting nucleic acid can comprise 1 additional nucleotide on the 5′ end of the nucleic acid-targeting nucleic acid. The 5′ engineered nucleic acid-targeting nucleic acid can comprise 2 additional nucleotides on the 5′ end of the nucleic acid-targeting nucleic acid. The 5′ engineered nucleic acid-targeting nucleic acid can comprise 3 additional nucleotides on the 5′ end of the nucleic acid-targeting nucleic acid.

[0373] The 5′ additional nucleotide can be an adenine. The 5′ additional nucleotide can be a guanine. The 5′ additional nucleotide can be a thymine. The 5′ additional nucleotide can be a cytosine. When there are more than one 5′ additional nucleotides, they can be any type of nucleotide and/or modified nucleotide.

[0374] The additional nucleotides can be part of the 5′ spacer extension sequence of the engineered nucleic acid-targeting nucleic acid. In other words, the additional nucleotide can be outside of the spacer, or immediately adjacent to the spacer. The spacer region can be 21 nucleotides in length. The spacer region can be 20 nucleotides in length. The spacer region can be 19 nucleotides in length. The length of both the spacer and the 5′ additional nucleotide can be 22 nucleotides in length. The length of both the spacer and the 5′ additional nucleotide can be 21 nucleotides in length. The length of both the spacer and the 5′ additional nucleotide can be 20 nucleotides in length. For example, an engineered nucleic acid-targeting nucleic acid termed GX19 can refer to a 19 nucleotide spacer plus an additional 5′ nucleotide (G). An engineered nucleic acid-targeting nucleic acid termed GX20 can refer to a 20 nucleotide spacer plus an additional 5′ nucleotide (G), for a total of 21 nucleotides.

[0375] The 5′ additional nucleotide of the 5′ engineered nucleic acid-targeting nucleic acid can be complementary to the target nucleic acid. In other words, the one or more 5′ additional nucleotides can be complementary to the one or more nucleotides adjacent to the region to which the spacer hybridizes. The one or more 5′ additional nucleotides may not be complementary to the target nucleic acid.

[0376] The one or more 5′ additional nucleotides may decrease the conformational flexibility of the nucleic acid-targeting nucleic acid and site-directed polypeptide complex. A decrease in conformational flexibility may increase specificity and/or decreasing off-targeting binding of the nucleic acid-targeting nucleic acid-site directed polypeptide complex.

[0377] A 5′ engineered nucleic acid-targeting nucleic acid comprising one or more 5′ additional nucleotides can bind a target nucleic acid with a greater or lesser binding constant than a wild-type nucleic acid-targeting nucleic acid (e.g., without one or more 5′ additional nucleotides). A 5′ engineered nucleic acid-targeting nucleic acid comprising one or more 5′ additional nucleotides can bind a target nucleic acid with at least 1-fold, 2-fold, 3-fold, 4-fold, 5-fold, 6-fold, 7-fold, 8-fold, 9-fold, or 10-fold or more greater or lesser binding affinity than a nucleic acid-targeting nucleic acid lacking the one or more 5′ additional nucleotides. A 5′ engineered nucleic acid-targeting nucleic acid comprising one or more 5′ additional nucleotides can bind a target nucleic acid with at most 1-fold, 2-fold, 3-fold, 4-fold, 5-fold, 6-fold, 7-fold, 8-fold, 9-fold, or 10-fold or more greater or lesser binding affinity than a nucleic acid-targeting nucleic acid lacking the one or more 5′ additional nucleotides.

[0378] A 5′ engineered nucleic acid-targeting nucleic acid comprising one or more 5′ additional nucleotides can reduce off-target binding compared to a nucleic acid-targeting nucleic acid without one or more 5′ additional nucleotides. A 5′ engineered nucleic acid-targeting nucleic acid comprising one or more 5′ additional nucleotides can reduce off-targeting binding by at least 1-fold, 2-fold, 3-fold, 4-fold, 5-fold, 6-fold, 7-fold, 8-fold, 9-fold, or 10-fold or more than a nucleic acid-targeting nucleic acid without one or more 5′ additional nucleotides. A 5′ engineered nucleic acid-targeting nucleic acid comprising one or more 5′ additional nucleotides can reduce off-targeting binding by at most 1-fold, 2-fold, 3-fold, 4-fold, 5-fold, 6-fold, 7-fold, 8-fold, 9-fold, or 10-fold or more than a nucleic acid-targeting nucleic acid without one or more 5′ additional nucleotides.

[0379] A 5′ engineered nucleic acid-targeting nucleic acid comprising one or more additional nucleotides can reduce off-target binding and/or cleavage by at least 10, 20, 30, 40, 50, 60, 70, 80, 90 or 100% compared to a nucleic acid-targeting nucleic acid lacking one or more 5′ additional nucleotides. A 5′ engineered nucleic acid-targeting nucleic acid comprising one or more additional nucleotides can reduce off-target binding and/or cleavage by at most 10, 20, 30, 40, 50, 60, 70, 80, 90 or 100% compared to a nucleic acid-targeting nucleic acid lacking one or more 5′ additional nucleotides. A 5′ engineered nucleic acid-targeting nucleic acid comprising one or more additional nucleotides can bind to and/or cleave a target nucleic acid by at least 10, 20, 30, 40, 50, 60, 70, 80, 90 or 100% more compared to an off-target nucleic acid. A 5′ engineered nucleic acid-targeting nucleic acid comprising one or more additional nucleotides can bind to and/or cleave a target nucleic acid by at most 10, 20, 30, 40, 50, 60, 70, 80, 90 or 100% more compared to an off-target nucleic acid.

[0380] Deletion

[0381] A 5′ engineered nucleic acid-targeting nucleic acid can comprise 1, 2 or 3 deleted nucleotides on the 5′ end of the nucleic acid-targeting nucleic acid. The deleted 5′ nucleotide can be located adjacent to the 5′ end of the spacer of the nucleic acid-targeting nucleic acid.

[0382] The 5′ engineered nucleic acid-targeting nucleic acid can comprise 1 deleted nucleotide on the 5′ end of the nucleic acid-targeting nucleic acid. The 5′ engineered nucleic acid-targeting nucleic acid can comprise 2 deleted nucleotides on the 5′ end of the nucleic acid-targeting nucleic acid. The 5′ engineered nucleic acid-targeting nucleic acid can comprise 3 deleted nucleotides on the 5′ end of the nucleic acid-targeting nucleic acid.

[0383] The 5′ deleted nucleotide can be an adenine. The 5′ deleted nucleotide can be a guanine. The 5′ deleted nucleotide can be a thymine. The 5′ deleted nucleotide can be a cytosine. When there are more than one 5′ deleted nucleotides, they can be any type of nucleotide and/or modified nucleotide.

[0384] The 5′ deleted nucleotide of the 5′ engineered nucleic acid-targeting nucleic acid can be complementary to the target nucleic acid. In other words, the one or more 5′ deleted nucleotides can be complementary to the one or more nucleotides adjacent to the region to which the spacer hybridizes. The one or more 5′ deleted nucleotides may not be complementary to the target nucleic acid.

[0385] The one or more 5′ deleted nucleotides may decrease the conformational flexibility of the nucleic acid-targeting nucleic acid and site-directed polypeptide complex. A decrease in conformational flexibility may increase specificity and/or decreasing off-targeting binding of the nucleic acid-targeting nucleic acid-site directed polypeptide complex.

[0386] A 5′ engineered nucleic acid-targeting nucleic acid comprising one or more 5′ nucleotide deletions can bind a target nucleic acid with a greater or lesser binding constant than a wild-type nucleic acid-targeting nucleic acid (e.g., without one or more 5′ deleted nucleotides). A 5′ engineered nucleic acid-targeting nucleic acid comprising one or more 5′ nucleotide deletions can bind a target nucleic acid with at least 1-fold, 2-fold, 3-fold, 4-fold, 5-fold, 6-fold, 7-fold, 8-fold, 9-fold, or 10-fold or more greater or lesser binding affinity than a nucleic acid-targeting nucleic acid lacking the one or more 5′ deleted nucleotides. A 5′ engineered nucleic acid-targeting nucleic acid comprising one or more 5′ nucleotide deletions can bind a target nucleic acid with at most 1-fold, 2-fold, 3-fold, 4-fold, 5-fold, 6-fold, 7-fold, 8-fold, 9-fold, or 10-fold or more greater or lesser binding affinity than a nucleic acid-targeting nucleic acid lacking the one or more 5′ deleted nucleotides.

[0387] A 5′ engineered nucleic acid-targeting nucleic acid comprising one or more 5′ nucleotide deletions can reduce off-target binding compared to a nucleic acid-targeting nucleic acid without one or more 5′ deleted nucleotides. A 5′ engineered nucleic acid-targeting nucleic acid comprising one or more 5′ nucleotide deletions can reduce off-targeting binding by at least 1-fold, 2-fold, 3-fold, 4-fold, 5-fold, 6-fold, 7-fold, 8-fold, 9-fold, or 10-fold or more than a nucleic acid-targeting nucleic acid without one or more 5′ deleted nucleotides. A 5′ engineered nucleic acid-targeting nucleic acid comprising one or more 5′ nucleotide deletions can reduce off-targeting binding by at most 1-fold, 2-fold, 3-fold, 4-fold, 5-fold, 6-fold, 7-fold, 8-fold, 9-fold, or 10-fold or more than a nucleic acid-targeting nucleic acid without one or more 5′ deleted nucleotides.

[0388] A 5′ engineered nucleic acid-targeting nucleic acid comprising a 5′ nucleotide deletion can reduce off-target binding and/or cleavage by at least 10, 20, 30, 40, 50, 60, 70, 80, 90 or 100% compared to a nucleic acid-targeting nucleic acid lacking a 5′ nucleotide deletion. A 5′ engineered nucleic acid-targeting nucleic acid comprising a 5′ nucleotide deletion can reduce off-target binding and/or cleavage by at most 10, 20, 30, 40, 50, 60, 70, 80, 90 or 100% compared to a nucleic acid-targeting nucleic acid lacking a 5′ nucleotide deletion. A 5′ engineered nucleic acid-targeting nucleic acid comprising a 5′ nucleotide deletion can bind to and/or cleave a target nucleic acid by at least 10, 20, 30, 40, 50, 60, 70, 80, 90 or 100% more compared to an off-target nucleic acid. A 5′ engineered nucleic acid-targeting nucleic acid comprising a 5′ nucleotide deletion can bind to and/or cleave a target nucleic acid by at most 10, 20, 30, 40, 50, 60, 70, 80, 90 or 100% more compared to an off-target nucleic acid.

[0389] Methods

[0390] The disclosure provides for methods for increasing specificity and/or reducing off-targeting binding and modification events by complexes comprising engineered site-directed polypeptide (e.g., Cas9) and an engineered nucleic acid-targeting nucleic acid of the disclosure. A non-natural or engineered nucleic acid-targeting nucleic acid of the disclosure can have a decreased ability to modify, for example, genomic DNA in regions that are not the on-target region.

[0391] The methods of the disclosure can include contacting a complex comprising a site-directed polypeptide and a nucleic acid-targeting nucleic acid of the disclosure to a target nucleic acid, wherein the complex contacts the target nucleic acid at least 10, 20, 30, 40, 50, 60, 70, 80, 90 or 100% or more than an off-target nucleic acid. The complex can contact the target nucleic acid at most 10, 20, 30, 40, 50, 60, 70, 80, 90 or 100% or more than an off-target nucleic acid. The complex can bind to a target nucleic acid with a binding affinity at least 1, 2, 3, 4, 5, 6, 7, 8, 9, or 10 or more fold greater or lesser than to an off-target nucleic acid. The complex can bind to a target nucleic acid with a binding affinity at most 1, 2, 3, 4, 5, 6, 7, 8, 9, or 10 or more fold greater or lesser than to an off-target nucleic acid. The complex can contact the target nucleic acid and/or off-target nucleic acid by hybridization between the target nucleic acid and/or off-target nucleic acid and the nucleic acid-targeting nucleic acid of the complex.

[0392] The disclosure provides for methods to modify a target nucleic acid using the nucleic acid-targeting nucleic acid of the disclosure. The method can be performed using any of the site-directed polypeptides, nucleic acid-targeting nucleic acids, and complexes of site-directed polypeptides and nucleic acid-targeting nucleic acids as described herein. For example, a target nucleic acid can be contacted with a complex comprising a site-directed polypeptide, an engineered nucleic acid-targeting nucleic acid. The site-directed polypeptide can site-specifically modify the target nucleic acid at and/or around the location targeted by the engineered nucleic acid-targeting nucleic acid. For example, the site-directed polypeptide can cleave the target nucleic acid. The site-directed polypeptide can introduce a double-stranded break into the target nucleic acid. The site-directed polypeptide can introduce a single-stranded break into the target nucleic acid.

[0393] The site-directed polypeptide can be a fusion protein that exhibits an enzymatic activity on the target nucleic acid. Exemplary enzymatic activities can include methylation, demethylation, acetylation, deacetylation, ubiquitination, deubiquitination, deamination, alkylation, depurination, oxidation, pyrimidine dimer formation, transposition, recombination, chain elongation, ligation, glycosylation. Phosphorylation, dephosphorylation, adenylation, deadenylation, SUMOylation, deSUMOylation, ribosylation, deribosylation, myristoylation, remodelling, cleavage, oxidoreduction, hydrolation, and isomerization. The site-directed polypeptide can increase transcription of the target nucleic acid. The site-directed polypeptide can decrease transcription of the target nucleic acid.

[0394] Non-limiting examples of modifications of a target nucleic acid include double-strand break, single-strand break, insertion of one or more nucleotide, deletion of one or more nucleotide, mutation of one or more nucleotide, insertion of a donor polynucleotide, increase in transcription, decrease in transcription, transgene insertion, and enzymatic modification. Exemplary modifications can include methylation, demethylation, acetylation, deacetylation, ubiquitination, deubiquitination, deamination, alkylation, depurination, oxidation, pyrimidine dimer formation, transposition, recombination, chain elongation, ligation, glycosylation, phosphorylation, dephosphorylation, adenylation, deadenylation, SUMOylation, deSUMOylation, ribosylation, deribosylation, myristoylation, remodelling, cleavage, oxidoreduction, hydrolation, and isomerization. In some embodiments, the modification is cleavage of a target nucleic acid. In some embodiments, the modification is double-strand break. In some embodiments, the modification is deletion of a nucleotide. In some embodiments, the modification is increase or decrease in transcription.

[0395] The modification of the target nucleic acid may occur at least 1, 2, 3, 4, 5, 6, 7, 8, 9, 10, 20, 30, 40, 50, 60, 70, 80, 90, 100 or more nucleotides away from the either the 5′ or 3′ end of the target nucleic acid. The modification of the target nucleic acid may occur at most 1, 2, 3, 4, 5, 6, 7, 8, 9, 10, 20, 30, 40, 50, 60, 70, 80, 90, 100 or more nucleotides away from the either the 5′ or 3′ end of the target nucleic acid. The modification can occur on a separate nucleic acid that does not comprise the target nucleic acid (e.g., another chromosome).

[0396] In some instances, a donor polynucleotide can be inserted into the target nucleic acid, when the target nucleic acid is cleaved. Donor polynucleotide insertion can be performed by the homologous recombination machinery of the cell. The donor polynucleotide may comprise homology arms that are partially or fully complementary to the regions of the target nucleic acid outside of the break point. The homology arms can be at least 1, 2, 3, 4, 5, 6, 7, 8, 9, 10, 20, 30, 40, 50, 60, 70, 80, 90, or 100 or more nucleotides in length. The homology arms can be at least 1, 2, 3, 4, 5, 6, 7, 8, 9, 10, 20, 30, 40, 50, 60, 70, 80, 90, or 100 or more nucleotides in length. The homology arms can be at least 10, 20, 30, 40, 50, 60, 70, 80, 90 or 100% complementary to the target nucleic acid on either side of the location in which the donor polynucleotide will be inserted.

[0397] A non-natural nucleic acid targeting nucleic acid of the disclosure can reduce off-target nucleic acid binding by at least about 1, about 2, about 3, about 4, about 5, about 6, about 7, about 8, about 9, about 10, about 15, about 20, about 25, about 30, about 35, about 40, about 45, about 50, about 55, about 60, about 65, about 70, about 75, about 80, about 85, about 90, or about 100% compared with a control nucleic acid-targeting nucleic acid. A non-natural nucleic acid targeting nucleic acid of the disclosure can reduce off-target nucleic acid binding by at most about 1, about 2, about 3, about 4, about 5, about 6, about 7, about 8, about 9, about 10, about 15, about 20, about 25, about 30, about 35, about 40, about 45, about 50, about 55, about 60, about 65, about 70, about 75, about 80, about 85, about 90, or about 100% compared with a control nucleic acid-targeting nucleic acid.

[0398] A non-natural nucleic acid targeting nucleic acid of the disclosure can reduce off-target nucleic acid cleavage by at least about 1, about 2, about 3, about 4, about 5, about 6, about 7, about 8, about 9, about 10, about 15, about 20, about 25, about 30, about 35, about 40, about 45, about 50, about 55, about 60, about 65, about 70, about 75, about 80, about 85, about 90, or about 100% compared with a control nucleic acid-targeting nucleic acid. A non-natural nucleic acid targeting nucleic acid of the disclosure can reduce off-target nucleic acid cleavage by at most about 1, about 2, about 3, about 4, about 5, about 6, about 7, about 8, about 9, about 10, about 15, about 20, about 25, about 30, about 35, about 40, about 45, about 50, about 55, about 60, about 65, about 70, about 75, about 80, about 85, about 90, or about 100% compared with a control nucleic acid-targeting nucleic acid.

[0399] A non-natural nucleic acid targeting nucleic acid of the disclosure can reduce off-target nucleic acid modification by at least about 1, about 2, about 3, about 4, about 5, about 6, about 7, about 8, about 9, about 10, about 15, about 20, about 25, about 30, about 35, about 40, about 45, about 50, about 55, about 60, about 65, about 70, about 75, about 80, about 85, about 90, or about 100% compared with a control nucleic acid-targeting nucleic acid. A non-natural nucleic acid targeting nucleic acid of the disclosure can reduce off-target nucleic acid modification by at most about 1, about 2, about 3, about 4, about 5, about 6, about 7, about 8, about 9, about 10, about 15, about 20, about 25, about 30, about 35, about 40, about 45, about 50, about 55, about 60, about 65, about 70, about 75, about 80, about 85, about 90, or about 100% compared with a control nucleic acid-targeting nucleic acid.

[0400] A non-natural nucleic acid targeting nucleic acid of the disclosure can increase site-specific binding to a target nucleic acid by at least about 1, about 2, about 3, about 4, about 5, about 6, about 7, about 8, about 9, about 10, about 15, about 20, about 25, about 30, about 35, about 40, about 45, about 50, about 55, about 60, about 65, about 70, about 75, about 80, about 85, about 90, or about 100% compared with a control nucleic acid-targeting nucleic acid. A non-natural nucleic acid targeting nucleic acid of the disclosure can increase site-specific binding to a target nucleic acid by at most about 1, about 2, about 3, about 4, about 5, about 6, about 7, about 8, about 9, about 10, about 15, about 20, about 25, about 30, about 35, about 40, about 45, about 50, about 55, about 60, about 65, about 70, about 75, about 80, about 85, about 90, or about 100% compared with a control nucleic acid-targeting nucleic acid.

[0401] A non-natural nucleic acid targeting nucleic acid of the disclosure can increase site-specific cleavage of a target nucleic acid by at least about 1, about 2, about 3, about 4, about 5, about 6, about 7, about 8, about 9, about 10, about 15, about 20, about 25, about 30, about 35, about 40, about 45, about 50, about 55, about 60, about 65, about 70, about 75, about 80, about 85, about 90, or about 100% compared with a control nucleic acid-targeting nucleic acid. A non-natural nucleic acid targeting nucleic acid of the disclosure can increase site-specific cleavage of a target nucleic acid by at most about 1, about 2, about 3, about 4, about 5, about 6, about 7, about 8, about 9, about 10, about 15, about 20, about 25, about 30, about 35, about 40, about 45, about 50, about 55, about 60, about 65, about 70, about 75, about 80, about 85, about 90, or about 100% compared with a control nucleic acid-targeting nucleic acid.

[0402] A non-natural nucleic acid targeting nucleic acid of the disclosure can increase site-specific modification of a target nucleic acid by at least about 1, about 2, about 3, about 4, about 5, about 6, about 7, about 8, about 9, about 10, about 15, about 20, about 25, about 30, about 35, about 40, about 45, about 50, about 55, about 60, about 65, about 70, about 75, about 80, about 85, about 90, or about 100% compared with a control nucleic acid-targeting nucleic acid. A non-natural nucleic acid targeting nucleic acid of the disclosure can increase site-specific modification of a target nucleic acid by at most about 1, about 2, about 3, about 4, about 5, about 6, about 7, about 8, about 9, about 10, about 15, about 20, about 25, about 30, about 35, about 40, about 45, about 50, about 55, about 60, about 65, about 70, about 75, about 80, about 85, about 90, or about 100% compared with a control nucleic acid-targeting nucleic acid.

[0403] While preferred embodiments of the present invention have been shown and described herein, it will be obvious to those skilled in the art that such embodiments are provided by way of example only. Numerous variations, changes, and substitutions will now occur to those skilled in the art without departing from the invention. It should be understood that various alternatives to the embodiments of the invention described herein may be employed in practicing the invention. It is intended that the following claims define the scope of the invention and that methods and structures within the scope of these claims and their equivalents be covered thereby.

### EXAMPLES

### Example 1

### Guide RNA Generation

[0404] Guide RNAs were produced by in vitro transcription from double-stranded DNA templates incorporating a T7 promoter at the 5′ end of the spacer sequence.

### Example 2

### DNA Template Generation

[0405] Double stranded DNA templates for the production of guide RNAs were assembled by PCR using internal assembly oligonucleotides containing the specific variant sequences and universal outer primer sequences corresponding to the T7 promoter (forward) and the 3′ end of the tracrRNA (reverse). Three different assembly reactions were used for the DNA templates. In all cases, the outer primers were used at 640 nM. Inner primer concentrations were used as defined in supplementary table. PCR reactions were set up with Kapa HiFi Hot Start Polymerase and contained 0.5 U of polymerase, lx reaction buffer, and 0.4 uM dNTPs. PCR assembly reactions were carried out using the following thermal cycling conditions: 95° C. for 2 minutes, 30 cycles of 20 seconds at 98° C., 20 seconds at 62° C., 20 s at 72° C., and a final extension at 72° C. for 2 min. DNA quality was evaluated by agarose gel electrophoresis.

### Example 3

### In Vitro Transcription

[0406] Between 0.25-0.5 ug of each DNA template was transcribed using T7 High Yield RNA synthesis Kit (NEB) for ˜16 hours at 37° C. The quality of the transcribed guide RNA was checked by agarose gel electrophoresis (2%, SYBR safe) and guide RNA were diluted 30 fold in water prior to use.

### Example 4

### Target dsDNA Generation

[0407] Double-stranded DNA target and/or off-target regions for biochemical assays were amplified by PCR from HEK-293 (ATCC) genomic DNA (gDNA) prepared using QuickExtract DNA Extraction solution (Epicentre). PCR reactions were set up with Kapa HiFi Hot Start polymerase and contained 0.5 U of Polymerase, lx reaction buffer, 0.4 uM dNTPs, 200 nM forward and reverse primers (see Table S4 for details). 20 ng/uL gDNA in a final volume of 25 uL were used to amplify the target region under the following conditions: 95° C. for 2 minutes, 4 cycles of 20 s at 98° C., 20 s at 70° C., (−2° C./cycle), 20 s at 72° C., followed by 25 cycles of 20 s at 98° C., 20 s at 62° C., 20 s at 72° C., and a final extension at 72° C. for 2 min. PCR products were cleaned up using Spin Smart PCR purification tubes (Denville Scientific) and quantified using NanoDrop 2000 UV-Vis spectrophotometer (Thermo Scientific).

### Example 5

### Cas9 Protein Production

[0408] Cas9 protein was produced according to the protocol described in Jinek et al., 2012, concentrated to 2.5 mg/mL and flash frozen in liquid Nitrogen, then stored at −80° C.

### Example 6

### Cas9 Cleavage Assays

[0409] Prior to carrying out cleavage assays, guide RNAs were incubated for 2 minutes at 95° C., removed from thermocycler and allowed to equilibrate to room temperature. Cas9 was diluted to a final concentration of 200 nM in reaction buffer (20 mM HEPES, 100 mM KCl, 5 mM MgCl₂, 1 mM DTT, and 5% glycerol at pH 7.4). 1.5 uL of each guide RNA was added to Cas9 and incubated at 37° C. for 10 minutes. Cleavage reactions were initiated by the addition of target and/or off-target DNA to a final concentration of 12.5 nM. Samples were mixed and centrifuged briefly before being incubated for 15 minutes at 37° C. Cleavage reactions were terminated by the addition of Proteinase K (Denville Scientific) at a final concentration of 0.2 ug/uL and 0.44 uL RNase A Solution (SigmaAldrich). Samples were incubated for 20 minutes at 37° C. then 20 minutes at 55° C. 8 uL of the total reaction were evaluated for cleavage activity by agarose gel electrophoresis (2%, SYBR Gold). In the specific case of target DNA used to assess the activity of AAVS1 guide RNAs, the appearance of DNA bands at ˜320 bp and ˜180 bp indicated that cleavage had occurred.

### Example 7

### Cell Culture and Cell Line Generation

[0410] HEK-293 cells were purchased from ATCC and cultured in DMEM growth medium (Life Technologies) supplemented with 10% FBS (Fisher Scientific), penicillin and streptomycin (Life Technologies). Cells were maintained at 37° C. in 5% CO₂ in a humidified incubator.

[0411] Cas9-expressing cell lines (HEK-293-spCas9) were generated by transfecting HEK-293 cells with a linearized plasmid containing a Cas9-GFP fusion gene expressed under the control of the CMV promoter and a neomycin resistance gene. Cas9-expressing cell lines were generated by transfecting HEK-293 cells (ATCC) in 6-well plates with linearized plasmid using Lipofectamine 2000 (Life Technologies) following the manufacturer's recommended protocol.

[0412] Stable Cas9-expressing cells were isolated by culturing cells in the presence of Geneticin (Life Technologies) at 300 ug/ml. Clonal cell lines were generated by culturing drug resistant cells at low density in 10 cm plates and picking individual colonies into a 96-well plate. Clonal cell lines were expanded and assessed for Cas9-GFP expression by visualization of GFP using a fluorescent microscope and by measuring Cas9 cleavage activity of target DNA following transfection with an appropriate engineered nucleic acid-targeting nucleic acids.

### Example 8

### Cell Transfections

[0413] Engineered nucleic acid-targeting nucleic acids were transfected into HEK-293-spCas9 cells using the following protocol. Engineered nucleic acid-targeting nucleic acids were diluted 150 fold and 2 uL along with 100 ng copGFP reporter plasmid (Santa Cruz Biotechnology), and 350 ng pBluescript plasmid were mixed with 0.5 uL Lipofectamine 2000 in a total volume of 50 uL serum-free DMEM and incubated for 30 minutes at room temperature in wells of a 96-well plate coated with collagen I. 1×10⁵ Cas9-HEK-293 cells in 100 uL growth medium were added to individual wells containing the transfection complexes. The plate was briefly vortexed and then maintained in a tissue culture incubator for 48 hours.

### Example 9

### Target dsDNA Generation for T7E1 Assay

[0414] Genomic DNA (gDNA) was isolated from HEK-293-spCas9 cells 48 hours after engineered nucleic acid-targeting nucleic acid transfection using 100 μL QuickExtract DNA Extraction solution (Epicentre) per well followed by incubation at 37° C. for 10 minutes, 55° C. for 6 minutes and 95° C. for 3 minutes to stop the reaction. gDNA samples were stored at −80° C. DNA for T7E1 assays was generated by PCR amplification of the target AAVS1 locus from isolated gDNA. PCR reactions were set up using 1 uL gDNA as template with Kapa HiFi Hot Start polymerase and containing 0.5 U of Polymerase, lx reaction buffer, 0.4 uM dNTPs and 300 nM forward and reverse primers in a total volume of 25 uL. Target DNA was amplified using the following conditions: 95° C. for 5 minutes, 4 cycles of 20 s at 98° C., 20 s at 70° C., (−2° C./cycle), 30 s at 72° C., followed by 30 cycles of 15 s at 98° C., 20 s at 62° C., 20 s at 72° C., and a final extension at 72° C. for 1 min.

### Example 10

### T7E1 Assay

[0415] PCR amplified target DNA for T7E1 assays was denatured at 95° C. for 10 minutes and then allowed to re-anneal by cooling to 25° C. at −0.5° C./s in a thermal cycler. The re-annealed DNA was incubated with 0.5 uL T7 Endonuclease I in 1×NEBuffer 2 buffer (New England Biolabs) in a total volume of 15 uL for 25 minutes at 37° C. The reaction was stopped by the addition of DNA sample loading buffer and the samples were electrophoresed on a 2% agarose gel. DNA bands were visualized using SYBR® Safe (Life Technologies) and UV illumination.

### Example 11

### Off-Target Activity Measurements

[0416] Engineered nucleic acid-targeting nucleic acids to test the effect of structure variants were produced by T7 RNA polymerase-based transcription from a double-stranded DNA template containing a T7 promoter. T7 RNA polymerase prefers a G as the first base of the transcribed RNA (at the 5′ end of the RNA). PCR primers used to construct all the templates for these experiments used a T7 promoter with a G positioned at the 5′ end of the spacer regardless of whether the G is present in the sequence targeted by the spacer or not. In other words, all RNAs transcribed from these templates can generate 21 base spacers with a 5′G (known as GX20 spacers). An alternative nomenclature is that the spacer comprises 20 bases and the 5′ spacer extension comprises a 5′ G. A set of 20 variant nucleic acid-targeting nucleic acids were also synthesized for two additional spacers, one targeting the human VEGFA gene as shown in FIG. 5, and one targeting the human EMX-1 gene as shown in FIG. 6.

[0417] The VEGFA engineered nucleic acid-targeting nucleic acids variants showed higher activity in the biochemical assay. Some guide variants were inactive as shown in FIG. 5. Cell-based activity for the VEGFA guide variants followed a similar pattern to the AAVS1 guide variants (FIG. 5). Nearly all EMX-1 guide variants were active biochemically, and most were active in cells (FIG. 6). Data from the EMX-1 nucleic acid-targeting nucleic acid variants indicates that different spacers can affect the ability of Cas9 to bind different nucleic acid-targeting nucleic acid variants and to modulate activity.

[0418] Both of the EMX-1 and VEGFA spacers contain a G as the 5′ nucleotide (position 20) within the spacer. By removing the 5′ G from the RNA polymerase template, a version of the spacer can be synthesized that does not have an additional 5′ G, and is 20 nucleotides long (GX19) rather than 21 nucleotides long (GX20).

[0419] The GX19 nucleic acid-targeting nucleic acids were more active both in biochemical assays and in cells, for both VEGFA and EMX-1 spacers (FIG. 7 and FIG. 8). Some guide variants (e.g. GV-4) that were inactive in all cell-based assays for all spacers demonstrate activity for EMX-1 GX19.

[0420] Both VEGFA and EMX-1 target sites are similar in sequence to other sites in the genome. The sequence specificity of a site-directed polypeptide, for example, Cas9, can be imperfect. Off-target test sites were determined by polymerase chain amplification of fragments that contained protospacer sequences similar and/or identical to the spacers of the nucleic acid-targeting nucleic acid of interest. Those sites can be cut biochemically by Cas9 and the GX20 engineered nucleic acid-targeting nucleic acids (FIG. 9A-B). When tested in cells, no off-target activity could be detected for the GX20 engineered nucleic acid-targeting nucleic acids (FIG. 9A-B). This was true for EMX-1, VEGFA, and other sites. Both transcribed RNA and DNA expression cassettes were tested for activity in HEK-293 cells, and while on-target activity remained significant, no activity at off-target sites could be detected by T7E1 assay (FIG. 10A-C). 6 additional sites were also tested and revealed no off target activity (FIGS. 10A-C). In this figure, the target nucleic acid is in the top box (e.g., DNMT3A). dCB refers to DNA expression of the nucleic acid-targeting nucleic acid variant. rCB refers to direct RNA transfection of the nucleic acid-targeting nucleic acid variant. The variant is the number in the box. In some of these experiments, for example FIG. 10B the spacer of the nucleic acid-targeting nucleic acid remains the same but the target nucleic acid is variable (e.g., Off1, Off2, Off3, etc).

[0421] FIGS. 11A and B show on- and off-target sequences for targets in human genome (DNMT3A, DNMT3B, CCR5, EMX-1, C4BPB, RNF2, FANCF, and VEGFA).

[0422] GX19 guides were also tested for off-target activity. Additionally, GGX20 guides were made, in which an additional G was added to the 5′ end to make a 22 base spacer. FIG. 12A-D shows data comparing the activity at on and off-target sites for GX19 guide RNAs targeting spacers from EMX-1, VEGFA, and FANCF. Boxes show conditions with appreciable off-target activity. In these experiments, either RNA injection (r) or DNA expression (d) of engineered nucleic acid-target nucleic acids were evaluated for their ability to cleave an on-target or off-target nucleic acid (EMX1 On, Off1, Off2 etc). For example, for the EMX1 gene, the off-target nucleic acids were determined from sequencing cleavage products from a complex comprising a site-directed polypeptide and EMX1 directed nucleic acid-targeting nucleic acid.

[0423] In all cases GX20 guide RNAs show less activity at the off-target site, while maintaining comparable on-target activity. GGX20 guide RNAs also show reduced activity at the off-target site, but on-target activity is also reduced. Addition of a G to the 5′ end of the spacer resulted in reduced off-target activity, with little impact on on-target activity.

[0424] Engineered nucleic acid-targeting nucleic acids for VEGFA and EMX-1 were also made with A, C, or T at the 5′ end and 19 base spacers. Yields for these engineered nucleic acid-targeting nucleic acids were significantly lower than for the GX19 guide RNAs (FIG. 13A). Despite this, for the VEGFA spacer, AX19, CX19, TX19 engineered nucleic acid-targeting nucleic acids have similar on-target activity to the GX19 engineered nucleic acid-targeting nucleic acids (FIG. 13B).

[0425] Additional experiments shown in FIG. 14 tested whether different engineered nucleic acid-targeting nucleic acids variants would result in changes to off-target activity. For the EMX-1 spacer, the GX20 spacer showed no activity at off-target sites for any of the 20 engineered nucleic acid-targeting nucleic acids variants tested. In contrast, all engineered nucleic acid-targeting nucleic acids variants for the GX19 spacer showed activity at off-target site 1. For the VEGFA spacer (FIGS. 15A and B), however, certain engineered nucleic acid-targeting nucleic acids variants (e.g. GV-15, GV-19) showed similar on-target activity, but significant reduced off-target activity at all four off-target sites.

### Example 12

### Determination of Activity of Nexus and Loop Nucleic Acid-Targeting Nucleic Acid Variants

[0426] Nucleic acid-targeting nucleic acid variants (“sgRNA variants”) comprising nexus and loop mutations were tested in biochemical and cellular assays as shown in FIG. 19.

[0427] FIG. 3 shows data generated using a T7E1 assay (in vivo) and using a biochemical assay (in vitro) for a series of variant guide RNA structures (FIG. 3A-B). Variations in the structure of the engineered nucleic acid-targeting nucleic acid backbone while leaving the spacer sequence unchanged can result in changes in nuclease activity at the desired target site both in biochemical assays (FIG. 3C) and in cells (FIG. 3D).

[0428] FIG. 4 shows biochemical and cell-based activity data for a further series of variant nucleic acid-targeting nucleic acid structures. The sequences of the variant engineered nucleic acid-targeting nucleic acids in FIG. 3A-D are shown in Table 2. The sequences of the variant engineered nucleic acid-targeting nucleic acids in FIG. 4 are shown in Table 3. Table 4 shows the primer sequences used to construct all the guide variants listed in Table 3, and for which data are shown in FIG. 4.

### Example 13

### Use of a Non-Natural Nucleic Acid-Targeting Nucleic Acid to Reduce Off-Target Activity During Genome Engineering

[0429] A first vector(s) encoding a first site-directed polypeptide and an engineered nucleic acid-targeting nucleic acid is introduced into a first group of cells, for example, human cells. A second vector(s) encoding a second site-directed polypeptide and a control nucleic acid-targeting nucleic acid, which lacks an engineered region, is introduced into a second group of cells. Inside the first and second group of cells, the first and second vectors express their elements, respectively. The engineered nucleic acid-targeting nucleic acid forms a first nucleoprotein complex with the first site-directed polypeptide. The control nucleic acid-targeting nucleic acid forms a second nucleoprotein complex with the second site-directed polypeptide. Guided by their respective nucleic-acid targeting nucleic acids, the first and second nucleoprotein complexes bind to and modify the genomic DNA of the first and second group of cells, respectively. The genomic DNA can be modified at target nucleic acids and off-target nucleic acids based on the specificity of the nucleic acid-targeting nucleic acids. In the first group of cells, the genomic DNA is modified at off-target sites, for example, at least 10% less than target sites owing to the engineered non-natural nucleic acid-targeting nucleic acid. The first group of cells also has a lower fraction of cells, for example, at least about 10% less than the second group of cells, with genomic DNA modified at off-target sites or sites other than the target site due to the targeting ability of the engineered nucleic acid-targeting nucleic acid compared with the control nucleic acid-targeting nucleic acid.

[0430] In some examples, the engineered nucleic acid-targeting nucleic acid results in, for example, at least about 20%, reduction in off-target binding and modification of the genomic DNA compared with the control nucleic acid-targeting nucleic acid. The fraction of the first group of cells that are modified at off-target sites are, for example, at least about 20% less than the second group of cells.

[0431] In some examples, the engineered nucleic acid-targeting nucleic acid results in, for example, about 90%, reduction in off-target binding and modification of the genomic DNA compared with the control nucleic acid-targeting nucleic acid. The fraction of the first group of cells that are modified at off-target sites are, for example, about 90% less than the second group of cells.

[0432] In some examples, the engineered nucleic acid-targeting nucleic acid results in, for example, about 95%, reduction in off-target binding and modification of the genomic DNA compared with the control nucleic acid-targeting nucleic acid. The fraction of the first group of cells that are modified at off-target sites are, for example, about 95% less than the second group of cells.

[0433] In some examples, the engineered nucleic acid-targeting nucleic acid results in, for example, about 100%, reduction in off-target binding and modification of the genomic DNA compared with the control nucleic acid-targeting nucleic acid. The fraction of the first group of cells that are modified at off-target sites are, for example, about 100% less than the second group of cells.

[0434] In some example the first site directed polypeptide is recombinantly expressed and the engineering nucleic acid-targeting nucleic acid is expressed in vitro. The engineered nucleic acid-targeting nucleic acid forms a nucleoprotein complex with the first site-directed polypeptide.

TABLE 2

| | Bio- | HEK- | | | | | | | | | | | | | | | | | | | | |
|---|---|---|---|---|---|---|---|---|---|---|---|---|---|---|---|---|---|---|---|---|---|---|
| | chemical | 293 | | | | | | | | | | | | | | | | | | | | |
| sgRNA | % | % | | | | | | | | | | | | | | | | | | | | |
| Var- | Cleav- | Cleav- | | Spac- | | | | | | | | | | | | | | | | | | |
| iant | age | age | Description | er | | | | | | | | | | | | | | | | | | |
| | | | | 1 | | | | | | | | | | | | | | | | | | |
| Con- | 92 | 54 | Control | G | G | G | G | C | C | A | C | U | A | G | G | G | A | C | A | G | G | A |
| trol | | | | | | | | | | | | | | | | | | | | | | |
| 1 | 89 | 65 | Upper Stem | G | G | G | G | C | C | A | C | U | A | G | G | G | A | C | A | G | G | A |
| | | | Variant | | | | | | | | | | | | | | | | | | | |
| 2 | 90 | 60 | Upper Stem | G | G | G | G | C | C | A | C | U | A | G | G | G | A | C | A | G | G | A |
| | | | Variant | | | | | | | | | | | | | | | | | | | |
| 3 | 87 | 57 | Lower Stem | G | G | G | G | C | C | A | C | U | A | G | G | G | A | C | A | G | G | A |
| | | | Variant | | | | | | | | | | | | | | | | | | | |
| 4 | 55 | 0 | Lower Stem | G | G | G | G | C | C | A | C | U | A | G | G | G | A | C | A | G | G | A |
| | | | Variant | | | | | | | | | | | | | | | | | | | |
| 5 | 90 | 40 | Upper and | G | G | G | G | C | C | A | C | U | A | G | G | G | A | C | A | G | G | A |
| | | | Lower | | | | | | | | | | | | | | | | | | | |
| | | | Stem Variant | | | | | | | | | | | | | | | | | | | |
| 6 | 84 | 59 | Lower Stem | G | G | G | G | C | C | A | C | U | A | G | G | G | A | C | A | G | G | A |
| | | | 5′G change | | | | | | | | | | | | | | | | | | | |
| 7 | 90 | 49 | Lower Stem | G | G | G | G | C | C | A | C | U | A | G | G | G | A | C | A | G | G | A |
| | | | 5′G change | | | | | | | | | | | | | | | | | | | |
| 8 | 0 | 0 | Remove Bulge | G | G | G | G | C | C | A | C | U | A | G | G | G | A | C | A | G | G | A |
| 9 | 95 | 57 | Change Bulge | G | G | G | G | C | C | A | C | U | A | G | G | G | A | C | A | G | G | A |
| | | | angle | | | | | | | | | | | | | | | | | | | |
| 10 | 94 | 60 | Change Bulge | G | G | G | G | C | C | A | C | U | A | G | G | G | A | C | A | G | G | A |
| | | | angle | | | | | | | | | | | | | | | | | | | |
| 11 | 81 | 52 | Remove Upper | G | G | G | G | C | C | A | C | U | A | G | G | G | A | C | A | G | G | A |
| | | | Stem and Loop | | | | | | | | | | | | | | | | | | | |
| 12 | 74 | 29 | Remove Bulge | G | G | G | G | C | C | A | C | U | A | G | G | G | A | C | A | G | G | A |
| | | | mgRNA | | | | | | | | | | | | | | | | | | | |
| 13 | 22 | 0 | Nexus Linker | G | G | G | G | C | C | A | C | U | A | G | G | G | A | C | A | G | G | A |
| | | | length | | | | | | | | | | | | | | | | | | | |
| 14 | 0 | 0 | Nexus Variant | G | G | G | G | C | C | A | C | U | A | G | G | G | A | C | A | G | G | A |
| 15 | 81 | 54 | Nexus Variant | G | G | G | G | C | C | A | C | U | A | G | G | G | A | C | A | G | G | A |
| 16 | 86 | 31 | Nexus Stem | G | G | G | G | C | C | A | C | U | A | G | G | G | A | C | A | G | G | A |
| | | | Length | | | | | | | | | | | | | | | | | | | |
| 17 | 32 | 0 | Nexus Stem | G | G | G | G | C | C | A | C | U | A | G | G | G | A | C | A | G | G | A |
| | | | Length | | | | | | | | | | | | | | | | | | | |
| 18 | 88 | 24 | Nexus Variant | G | G | G | G | C | C | A | C | U | A | G | G | G | A | C | A | G | G | A |
| 19 | 79 | 53 | Nexus Variant | G | G | G | G | C | C | A | C | U | A | G | G | G | A | C | A | G | G | A |
| 20 | 9 | 0 | Hairpin | G | G | G | G | C | C | A | C | U | A | G | G | G | A | C | A | G | G | A |
| | | | Truncation | | | | | | | | | | | | | | | | | | | |
| | Bio- | HEK- | | | | | | | | | | | | | | | | | | | | |
| | chemical | 293 | | | | | | | | | | | | | | | | | | | | |
| sgRNA | % | % | | | | | | | | | | | | | | | | | | | | |
| Var- | Cleav- | Cleav- | | | Lower | | | | | | | | Upper | | | | | | | | | |
| iant | age | age | Description | | Stem | | | | | | Bulge | | Stem | | | | Loop | | | | | |
| | | | | | 21 | | | | | | | | | | 31 | | | | | | | |
| Con- | 92 | 54 | Control | U | G | U | U | U | U | A | G | A | G | C | U | A | G | A | A | A | | |
| trol | | | | | | | | | | | | | | | | | | | | | | |
| 1 | 89 | 65 | Upper Stem | U | G | U | U | U | U | A | G | A | G | G | A | U | G | A | A | A | | |
| | | | Variant | | | | | | | | | | | | | | | | | | | |
| 2 | 90 | 60 | Upper Stem | U | G | U | U | U | U | A | G | A | C | U | C | A | G | A | A | A | | |
| | | | Variant | | | | | | | | | | | | | | | | | | | |
| 3 | 87 | 57 | Lower Stem | U | G | U | C | U | C | A | G | A | G | C | U | A | G | A | A | A | | |
| | | | Variant | | | | | | | | | | | | | | | | | | | |
| 4 | 55 | 0 | Lower Stem | U | G | U | G | G | U | A | G | A | G | C | U | A | G | A | A | A | | |
| | | | Variant | | | | | | | | | | | | | | | | | | | |
| 5 | 90 | 40 | Upper and | U | G | A | C | G | A | U | G | A | G | A | C | G | G | A | A | A | | |
| | | | Lower | | | | | | | | | | | | | | | | | | | |
| | | | Stem Variant | | | | | | | | | | | | | | | | | | | |
| 6 | 84 | 59 | Lower Stem | U | A | U | U | U | U | A | G | A | G | C | U | A | G | A | A | A | | |
| | | | 5′G change | | | | | | | | | | | | | | | | | | | |
| 7 | 90 | 49 | Lower Stem | U | A | U | U | U | U | A | G | A | G | C | U | A | G | A | A | A | | |
| | | | 5′G change | | | | | | | | | | | | | | | | | | | |
| 8 | 0 | 0 | Remove Bulge | U | G | U | U | U | U | A | G | A | G | C | U | A | G | A | A | A | | |
| 9 | 95 | 57 | Change Bulge | U | G | U | U | U | U | A | — | — | G | C | U | A | G | A | A | A | | |
| | | | angle | | | | | | | | | | | | | | | | | | | |
| 10 | 94 | 60 | Change Bulge | U | G | U | U | U | U | A | G | A | G | C | U | A | G | A | A | A | | |
| | | | angle | | | | | | | | | | | | | | | | | | | |
| 11 | 81 | 52 | Remove Upper | U | G | U | U | U | U | A | G | A | — | — | — | G | — | — | — | A | | |
| | | | Stem and Loop | | | | | | | | | | | | | | | | | | | |
| 12 | 74 | 29 | Remove Bulge | U | G | U | U | U | U | A | G | A | — | — | — | — | — | — | U | A | | |
| | | | mgRNA | | | | | | | | | | | | | | | | | | | |
| 13 | 22 | 0 | Nexus Linker | U | G | U | U | U | U | A | G | A | G | C | U | A | G | A | A | A | | |
| | | | length | | | | | | | | | | | | | | | | | | | |
| 14 | 0 | 0 | Nexus Variant | U | G | U | U | U | U | A | G | A | G | C | U | A | G | A | A | A | | |
| 15 | 81 | 54 | Nexus Variant | U | G | U | U | U | U | A | G | A | G | C | U | A | G | A | A | A | | |
| 16 | 86 | 31 | Nexus Stem | U | G | U | U | U | U | A | G | A | G | C | U | A | G | A | A | A | | |
| | | | Length | | | | | | | | | | | | | | | | | | | |
| 17 | 32 | 0 | Nexus Stem | U | G | U | U | U | U | A | G | A | G | C | U | A | G | A | A | A | | |
| | | | Length | | | | | | | | | | | | | | | | | | | |
| 18 | 88 | 24 | Nexus Variant | U | G | U | U | U | U | A | G | A | G | C | U | A | G | A | A | A | | |
| 19 | 79 | 53 | Nexus Variant | U | G | U | U | U | U | A | G | A | G | C | U | A | G | A | A | A | | |
| 20 | 9 | 0 | Hairpin | U | G | U | U | U | U | A | G | A | G | C | U | A | G | A | A | A | | |
| | | | Truncation | | | | | | | | | | | | | | | | | | | |
| | Bio- | HEK- | | | | | | | | | | | | | | | | | | | | |
| | chemical | 293 | | | | | | | | | | | | | | | | | | | | |
| sgRNA | % | % | | | | | | | | | | | | | | | | | | | | |
| Var- | Cleav- | Cleav- | | Upper | | | | | | | | Lower | | | | | | | | | | |
| iant | age | age | Description | Stem | | | | Bulge | | | | Stem | | | | | | Nexus | | | | |
| | | | | | | | | 41 | | | | | | | | | | 51 | | | | |
| Con- | 92 | 54 | Control | U | A | G | C | A | A | G | U | U | A | A | A | A | U | A | A | — | — | G |
| trol | | | | | | | | | | | | | | | | | | | | | | |
| 1 | 89 | 65 | Upper Stem | A | U | C | C | A | A | G | U | U | A | A | A | A | U | A | A | — | — | G |
| | | | Variant | | | | | | | | | | | | | | | | | | | |
| 2 | 90 | 60 | Upper Stem | U | C | A | G | A | A | G | U | U | A | A | A | A | U | A | A | — | — | G |
| | | | Variant | | | | | | | | | | | | | | | | | | | |
| 3 | 87 | 57 | Lower Stem | U | A | G | C | A | A | G | U | U | G | A | G | A | U | A | A | — | — | G |
| | | | Variant | | | | | | | | | | | | | | | | | | | |
| 4 | 55 | 0 | Lower Stem | U | A | G | C | A | A | G | U | U | A | A | A | A | U | A | A | — | — | G |
| | | | Variant | | | | | | | | | | | | | | | | | | | |
| 5 | 90 | 40 | Upper and | C | G | U | C | A | A | G | U | A | U | C | G | U | U | A | A | — | — | G |
| | | | Lower | | | | | | | | | | | | | | | | | | | |
| | | | Stem Variant | | | | | | | | | | | | | | | | | | | |
| 6 | 84 | 59 | Lower Stem | U | A | G | C | A | A | G | U | A | A | A | A | A | U | A | A | — | — | G |
| | | | 5′G change | | | | | | | | | | | | | | | | | | | |
| 7 | 90 | 49 | Lower Stem | U | A | G | C | A | A | G | U | U | A | A | A | A | C | A | A | — | — | G |
| | | | 5′G change | | | | | | | | | | | | | | | | | | | |
| 8 | 0 | 0 | Remove Bulge | U | A | G | — | — | C | U | C | U | A | A | A | A | U | A | A | — | — | G |
| 9 | 95 | 57 | Change Bulge | U | A | G | C | A | A | G | U | U | A | A | A | A | U | A | A | — | — | G |
| | | | angle | | | | | | | | | | | | | | | | | | | |
| 10 | 94 | 60 | Change Bulge | U | A | — | — | — | — | G | U | U | A | A | A | A | U | A | A | — | — | G |
| | | | angle | | | | | | | | | | | | | | | | | | | |
| 11 | 81 | 52 | Remove Upper | — | — | — | C | A | A | G | U | U | A | A | A | A | U | A | A | — | — | G |
| | | | Stem and Loop | | | | | | | | | | | | | | | | | | | |
| 12 | 74 | 29 | Remove Bulge | — | — | — | — | — | — | C | U | U | A | A | A | A | U | A | A | — | — | G |
| | | | mgRNA | | | | | | | | | | | | | | | | | | | |
| 13 | 22 | 0 | Nexus Linker | U | A | G | C | A | A | G | U | U | A | A | A | A | U | A | A | C | C | G |
| | | | length | | | | | | | | | | | | | | | | | | | |
| 14 | 0 | 0 | Nexus Variant | U | A | G | C | A | A | G | U | U | A | A | A | A | U | A | A | — | — | C |
| 15 | 81 | 54 | Nexus Variant | U | A | G | C | A | A | G | U | U | A | A | A | A | U | A | A | — | — | G |
| 16 | 86 | 31 | Nexus Stem | U | A | G | C | A | A | G | U | U | A | A | A | A | U | A | A | — | — | A |
| | | | Length | | | | | | | | | | | | | | | | | | | |
| 17 | 32 | 0 | Nexus Stem | U | A | G | C | A | A | G | U | U | A | A | A | A | U | A | A | — | — | G |
| | | | Length | | | | | | | | | | | | | | | | | | | |
| 18 | 88 | 24 | Nexus Variant | U | A | G | C | A | A | G | U | U | A | A | A | A | U | A | A | — | — | G |
| 19 | 79 | 53 | Nexus Variant | U | A | G | C | A | A | G | U | U | A | A | A | A | U | A | A | — | — | G |
| 20 | 9 | 0 | Hairpin | U | A | G | C | A | A | G | U | U | A | A | A | A | U | A | A | — | — | G |
| | | | Truncation | | | | | | | | | | | | | | | | | | | |
| | Bio- | HEK- | | | | | | | | | | | | | | | | | | | | |
| | chemical | 293 | | | | | | | | | | | | | | | | | | | | |
| sgRNA | % | % | | | | | | | | | | | | | | | | | | | | |
| Var- | Cleav- | Cleav- | | | | | | | | | | | | | | | Hair- | | | | | |
| iant | age | age | Description | | | | | | | | | | | | | | pins | | | | | |
| | | | | | | | | | | | | | 61 | | | | | | | | | |
| Con- | 92 | 54 | Control | G | — | C | U | A | G | U | — | C | C | G | U | U | A | U | C | A | A | |
| trol | | | | | | | | | | | | | | | | | | | | | | |
| 1 | 89 | 65 | Upper Stem | G | — | C | U | A | G | U | — | C | C | G | U | U | A | U | C | A | A | |
| | | | Variant | | | | | | | | | | | | | | | | | | | |
| 2 | 90 | 60 | Upper Stem | G | — | C | U | A | G | U | — | C | C | G | U | U | A | U | C | A | A | |
| | | | Variant | | | | | | | | | | | | | | | | | | | |
| 3 | 87 | 57 | Lower Stem | G | — | C | U | A | G | U | — | C | C | G | U | U | A | U | C | A | A | |
| | | | Variant | | | | | | | | | | | | | | | | | | | |
| 4 | 55 | 0 | Lower Stem | G | — | C | U | A | G | U | — | C | C | G | U | U | A | U | C | A | A | |
| | | | Variant | | | | | | | | | | | | | | | | | | | |
| 5 | 90 | 40 | Upper and | G | — | C | U | A | G | U | — | C | C | G | U | U | A | U | C | A | A | |
| | | | Lower | | | | | | | | | | | | | | | | | | | |
| | | | Stem Variant | | | | | | | | | | | | | | | | | | | |
| 6 | 84 | 59 | Lower Stem | G | — | C | U | A | G | U | — | C | C | G | U | U | A | U | C | A | A | |
| | | | 5′G change | | | | | | | | | | | | | | | | | | | |
| 7 | 90 | 49 | Lower Stem | G | — | C | U | A | G | U | — | C | C | G | U | U | A | U | C | A | A | |
| | | | 5′G change | | | | | | | | | | | | | | | | | | | |
| 8 | 0 | 0 | Remove Bulge | G | — | C | U | A | G | U | — | C | C | G | U | U | A | U | C | A | A | |
| 9 | 95 | 57 | Change Bulge | G | — | C | U | A | G | U | — | C | C | G | U | U | A | U | C | A | A | |
| | | | angle | | | | | | | | | | | | | | | | | | | |
| 10 | 94 | 60 | Change Bulge | G | — | C | U | A | G | U | — | C | C | G | U | U | A | U | C | A | A | |
| | | | angle | | | | | | | | | | | | | | | | | | | |
| 11 | 81 | 52 | Remove Upper | G | — | C | U | A | G | U | — | C | C | G | U | U | A | U | C | A | A | |
| | | | Stem and Loop | | | | | | | | | | | | | | | | | | | |
| 12 | 74 | 29 | Remove Bulge | G | — | C | U | A | G | U | — | C | C | G | U | U | A | U | C | A | A | |
| | | | mgRNA | | | | | | | | | | | | | | | | | | | |
| 13 | 22 | 0 | Nexus Linker | G | — | C | U | A | G | U | — | C | C | G | U | U | A | U | C | A | A | |
| | | | length | | | | | | | | | | | | | | | | | | | |
| 14 | 0 | 0 | Nexus Variant | C | — | C | U | A | G | U | — | C | C | G | U | U | A | U | C | A | A | |
| 15 | 81 | 54 | Nexus Variant | A | — | C | U | A | G | U | — | U | C | G | U | U | A | U | C | A | A | |
| 16 | 86 | 31 | Nexus Stem | G | — | C | U | A | G | U | — | C | U | G | U | U | A | U | C | A | A | |
| | | | Length | | | | | | | | | | | | | | | | | | | |
| 17 | 32 | 0 | Nexus Stem | G | G | C | U | A | G | U | C | C | C | G | U | U | A | U | C | A | A | |
| | | | Length | | | | | | | | | | | | | | | | | | | |
| 18 | 88 | 24 | Nexus Variant | G | — | C | U | U | C | A | — | C | C | G | U | U | A | U | C | A | A | |
| 19 | 79 | 53 | Nexus Variant | G | — | C | U | A | G | U | — | C | C | G | A | A | U | U | C | A | A | |
| 20 | 9 | 0 | Hairpin | G | — | C | U | A | G | U | — | C | C | G | U | U | A | U | — | — | — | |
| | | | Truncation | | | | | | | | | | | | | | | | | | | |
| | Bio- | HEK- | | | | | | | | | | | | | | | | | | | | |
| | chemical | 293 | | | | | | | | | | | | | | | | | | | | |
| sgRNA | % | % | | | | | | | | | | | | | | | | | | | | |
| Var- | Cleav- | Cleav- | | | | | | | | | | | | | | | | | | | | |
| iant | age | age | Description | | | | | | | | | | | | | | | | | | | |
| | | | | | 71 | | | | | | | | | | 81 | | | | | | | |
| Con- | 92 | 54 | Control | C | U | U | G | A | A | A | A | A | G | U | G | G | C | A | C | C | G | |
| trol | | | | | | | | | | | | | | | | | | | | | | |
| 1 | 89 | 65 | Upper Stem | C | U | U | G | A | A | A | A | A | G | U | G | G | C | A | C | C | G | |
| | | | Variant | | | | | | | | | | | | | | | | | | | |
| 2 | 90 | 60 | Upper Stem | C | U | U | G | A | A | A | A | A | G | U | G | G | C | A | C | C | G | |
| | | | Variant | | | | | | | | | | | | | | | | | | | |
| 3 | 87 | 57 | Lower Stem | C | U | U | G | A | A | A | A | A | G | U | G | G | C | A | C | C | G | |
| | | | Variant | | | | | | | | | | | | | | | | | | | |
| 4 | 55 | 0 | Lower Stem | C | U | U | G | A | A | A | A | A | G | U | G | G | C | A | C | C | G | |
| | | | Variant | | | | | | | | | | | | | | | | | | | |
| 5 | 90 | 40 | Upper and | C | U | U | G | A | A | A | A | A | G | U | G | G | C | A | C | C | G | |
| | | | Lower | | | | | | | | | | | | | | | | | | | |
| | | | Stem Variant | | | | | | | | | | | | | | | | | | | |
| 6 | 84 | 59 | Lower Stem | C | U | U | G | A | A | A | A | A | G | U | G | G | C | A | C | C | G | |
| | | | 5′G change | | | | | | | | | | | | | | | | | | | |
| 7 | 90 | 49 | Lower Stem | C | U | U | G | A | A | A | A | A | G | U | G | G | C | A | C | C | G | |
| | | | 5′G change | | | | | | | | | | | | | | | | | | | |
| 8 | 0 | 0 | Remove Bulge | C | U | U | G | A | A | A | A | A | G | U | G | G | C | A | C | C | G | |
| 9 | 95 | 57 | Change Bulge | C | U | U | G | A | A | A | A | A | G | U | G | G | C | A | C | C | G | |
| | | | angle | | | | | | | | | | | | | | | | | | | |
| 10 | 94 | 60 | Change Bulge | C | U | U | G | A | A | A | A | A | G | U | G | G | C | A | C | C | G | |
| | | | angle | | | | | | | | | | | | | | | | | | | |
| 11 | 81 | 52 | Remove Upper | C | U | U | G | A | A | A | A | A | G | U | G | G | C | A | C | C | G | |
| | | | Stem and Loop | | | | | | | | | | | | | | | | | | | |
| 12 | 74 | 29 | Remove Bulge | C | U | U | G | A | A | A | A | A | G | U | G | G | C | A | C | C | G | |
| | | | mgRNA | | | | | | | | | | | | | | | | | | | |
| 13 | 22 | 0 | Nexus Linker | C | U | U | G | A | A | A | A | A | G | U | G | G | C | A | C | C | G | |
| | | | length | | | | | | | | | | | | | | | | | | | |
| 14 | 0 | 0 | Nexus Variant | C | U | U | G | A | A | A | A | A | G | U | G | G | C | A | C | C | G | |
| 15 | 81 | 54 | Nexus Variant | C | U | U | G | A | A | A | A | A | G | U | G | G | C | A | C | C | G | |
| 16 | 86 | 31 | Nexus Stem | C | U | U | G | A | A | A | A | A | G | U | G | G | C | A | C | C | G | |
| | | | Length | | | | | | | | | | | | | | | | | | | |
| 17 | 32 | 0 | Nexus Stem | C | U | U | G | A | A | A | A | A | G | U | G | G | C | A | C | C | G | |
| | | | Length | | | | | | | | | | | | | | | | | | | |
| 18 | 88 | 24 | Nexus Variant | C | U | U | G | A | A | A | A | A | G | U | G | G | C | A | C | C | G | |
| 19 | 79 | 53 | Nexus Variant | C | U | U | G | A | A | A | A | A | G | U | G | G | C | A | C | C | G | |
| 20 | 9 | 0 | Hairpin | — | — | — | — | — | — | — | — | — | — | — | — | — | — | — | — | — | — | |
| | | | Truncation | | | | | | | | | | | | | | | | | | | |
| | Bio- | HEK- | | | | | | | | | | | | | | | | | | | | |
| | chemical | 293 | | | | | | | | | | | | | | | | | | | | |
| sgRNA | % | % | | | | | | | | | | | | | | | | | | | | |
| Var- | Cleav- | Cleav- | | | | | | | | | | | | | | | | | | | | |
| iant | age | age | Description | | | | | | | | | | | | | | | | | | | |
| | | | | | | | 91 | | | | | | | | | 101 | | | | | | |
| Con- | 92 | 54 | Control | A | G | U | C | G | G | U | G | C | U | U | U | U | U | U | U | U | | |
| trol | | | | | | | | | | | | | | | | | | | | | | |
| 1 | 89 | 65 | Upper Stem | A | G | U | C | G | G | U | G | C | U | U | U | U | U | U | U | U | | |
| | | | Variant | | | | | | | | | | | | | | | | | | | |
| 2 | 90 | 60 | Upper Stem | A | G | U | C | G | G | U | G | C | U | U | U | U | U | U | U | U | | |
| | | | Variant | | | | | | | | | | | | | | | | | | | |
| 3 | 87 | 57 | Lower Stem | A | G | U | C | G | G | U | G | C | U | U | U | U | U | U | U | U | | |
| | | | Variant | | | | | | | | | | | | | | | | | | | |
| 4 | 55 | 0 | Lower Stem | A | G | U | C | G | G | U | G | C | U | U | U | U | U | U | U | U | | |
| | | | Variant | | | | | | | | | | | | | | | | | | | |
| 5 | 90 | 40 | Upper and | A | G | U | C | G | G | U | G | C | U | U | U | U | U | U | U | U | | |
| | | | Lower | | | | | | | | | | | | | | | | | | | |
| | | | Stem Variant | | | | | | | | | | | | | | | | | | | |
| 6 | 84 | 59 | Lower Stem | A | G | U | C | G | G | U | G | C | U | U | U | U | U | U | U | U | | |
| | | | 5′G change | | | | | | | | | | | | | | | | | | | |
| 7 | 90 | 49 | Lower Stem | A | G | U | C | G | G | U | G | C | U | U | U | U | U | U | U | U | | |
| | | | 5′G change | | | | | | | | | | | | | | | | | | | |
| 8 | 0 | 0 | Remove Bulge | A | G | U | C | G | G | U | G | C | U | U | U | U | U | U | U | U | | |
| 9 | 95 | 57 | Change Bulge | A | G | U | C | G | G | U | G | C | U | U | U | U | U | U | U | U | | |
| | | | angle | | | | | | | | | | | | | | | | | | | |
| 10 | 94 | 60 | Change Bulge | A | G | U | C | G | G | U | G | C | U | U | U | U | U | U | U | U | | |
| | | | angle | | | | | | | | | | | | | | | | | | | |
| 11 | 81 | 52 | Remove Upper | A | G | U | C | G | G | U | G | C | U | U | U | U | U | U | U | U | | |
| | | | Stem and Loop | | | | | | | | | | | | | | | | | | | |
| 12 | 74 | 29 | Remove Bulge | A | G | U | C | G | G | U | G | C | U | U | U | U | U | U | U | U | | |
| | | | mgRNA | | | | | | | | | | | | | | | | | | | |
| 13 | 22 | 0 | Nexus Linker | A | G | U | C | G | G | U | G | C | U | U | U | U | U | U | U | U | | |
| | | | length | | | | | | | | | | | | | | | | | | | |
| 14 | 0 | 0 | Nexus Variant | A | G | U | C | G | G | U | G | C | U | U | U | U | U | U | U | U | | |
| 15 | 81 | 54 | Nexus Variant | A | G | U | C | G | G | U | G | C | U | U | U | U | U | U | U | U | | |
| 16 | 86 | 31 | Nexus Stem | A | G | U | C | G | G | U | G | C | U | U | U | U | U | U | U | U | | |
| | | | Length | | | | | | | | | | | | | | | | | | | |
| 17 | 32 | 0 | Nexus Stem | A | G | U | C | G | G | U | G | C | U | U | U | U | U | U | U | U | | |
| | | | Length | | | | | | | | | | | | | | | | | | | |
| 18 | 88 | 24 | Nexus Variant | A | G | U | C | G | G | U | G | C | U | U | U | U | U | U | U | U | | |
| 19 | 79 | 53 | Nexus Variant | A | G | U | C | G | G | U | G | C | U | U | U | U | U | U | U | U | | |
| 20 | 9 | 0 | Hairpin | — | — | — | — | — | — | — | — | — | — | U | U | U | U | U | U | U | | |
| | | | Truncation | | | | | | | | | | | | | | | | | | | |

TABLE 3

| | sgRNA | Bio- | HEK- | | | | | | | | | | | | | |
|---|---|---|---|---|---|---|---|---|---|---|---|---|---|---|---|---|
| | Variant | chemical | 293 | | | | | | | | | | | | | |
| sgRNA | ## in | % | % | | | | | | | | | | | | | |
| Variant | Table 2 | Cleavage | Cleavage | Description | | | Spacer | | | | | | | | | |
| | | | | | | | 1 | | | | | | | | | |
| Control | | 91 | 58 | Control | | | G | G | G | G | C | C | A | C | U | |
| GV-1 | | 94 | 21 | Lower Stem Variant | | | G | G | G | G | C | C | A | C | U | |
| GV-2 | | 87 | 33 | Lower Stem Variant | | | G | G | G | G | C | C | A | C | U | |
| GV-3 | 1 | 91 | 60 | Upper Stem Variant | | | G | G | G | G | C | C | A | C | U | |
| GV-4 | | 94 | 34 | Upper and Lower | | | G | G | G | G | C | C | A | C | U | |
| | | | | Stem Variant | | | | | | | | | | | | |
| GV-5 | | 94 | 48 | Upper and Lower | | | G | G | G | G | C | C | A | C | U | |
| | | | | Stem Variant | | | | | | | | | | | | |
| GV-6 | | 92 | ND | Upper and Lower | | | G | G | G | G | C | C | A | C | U | |
| | | | | Stem Variant | | | | | | | | | | | | |
| GV-7 | | 5 | 6 | Upper and Lower | | | G | G | G | G | C | C | A | C | U | |
| | | | | Stem and Bulge Variant | | | | | | | | | | | | |
| GV-8 | | 95 | 0 | Upper and Lower | | | G | G | G | G | C | C | A | C | U | |
| | | | | Stem and Bulge Variant | | | | | | | | | | | | |
| GV-9 | | 94 | ND | Lower Stem Variant | | | G | G | G | G | C | C | A | C | U | |
| GV-10 | 3 | 91 | 61 | Lower Stem Variant | | | G | G | G | G | C | C | A | C | U | |
| GV-11 | | 94 | 45 | Lower Stem Variant | | | G | G | G | G | C | C | A | C | U | |
| GV-12 | 2 | 92 | 69 | Upper Stem Variant | | | G | G | G | G | C | C | A | C | U | |
| GV-13 | 8 | 0 | 0 | Remove Bulge | | | G | G | G | G | C | C | A | C | U | |
| GV-14 | | 0 | 0 | Remove Bulge | | | G | G | G | G | C | C | A | C | U | |
| GV-15 | | 34 | 0 | Remove Upper | | | G | G | G | G | C | C | A | C | U | |
| | | | | Stem and Bulge | | | | | | | | | | | | |
| GV-16 | 6 | 87 | 49 | Lower Stem 5′G change | | | G | G | G | G | C | C | A | C | U | |
| GV-17 | 7 | 89 | 47 | Lower Stem 5′G change | | | G | G | G | G | C | C | A | C | U | |
| GV-18 | | 0 | 0 | Upper and Lower | | | G | G | G | G | C | C | A | C | U | |
| | | | | Stem and Bulge Variant | | | | | | | | | | | | |
| GV-19 | 5 | 93 | 26 | Upper and Lower | | | G | G | G | G | C | C | A | C | U | |
| | | | | Stem Variant | | | | | | | | | | | | |
| GV-20 | | 0 | 0 | Bulge Variant | | | G | G | G | G | C | C | A | C | U | |
| GV-21 | | 92 | 19 | Lower Stem Variant | | | G | G | G | G | C | C | A | C | U | |
| GV-22 | 4 | 71 | 0 | Lower Stem Variant | | | G | G | G | G | C | C | A | C | U | |
| GV-23 | | 99 | 0 | Lower Stem Variant | | | G | G | G | G | C | C | A | C | U | |
| GV-24 | | 0 | 6 | Lower Stem Variant | | | G | G | G | G | C | C | A | C | U | |
| GV-25 | | 88 | 0 | Lower Stem Variant | | | G | G | G | G | C | C | A | C | U | |
| GV-26 | | 82 | 7 | Lower Stem Variant | | | G | G | G | G | C | C | A | C | U | |
| GV-27 | 13 | 32 | 0 | Nexus Linker length | | | G | G | G | G | C | C | A | C | U | |
| GV-28 | | 0 | 0 | Nexus Linker length | | | G | G | G | G | C | C | A | C | U | |
| GV-29 | | 26 | 0 | Nexus Linker length | | | G | G | G | G | C | C | A | C | U | |
| GV-30 | | 0 | 0 | Nexus Linker length | | | G | G | G | G | C | C | A | C | U | |
| GV-31 | | 1 | 0 | Nexus Linker length | | | G | G | G | G | C | C | A | C | U | |
| GV-32 | | 91 | 58 | Control | | | G | G | G | G | C | C | A | C | U | |
| GV-33 | | 84 | 59 | Remove Upper Stem | | | G | G | G | G | C | C | A | C | U | |
| GV-34 | 11 | 86 | 76 | Remove Upper | | | G | G | G | G | C | C | A | C | U | |
| | | | | Stem and Loop | | | | | | | | | | | | |
| GV-35 | | 85 | 24 | Miniature sgRNA | | | G | G | G | G | C | C | A | C | U | |
| GV-36 | | 3 | 0 | Miniature sgRNA | | | G | G | G | G | C | C | A | C | U | |
| | sgRNA | Bio- | HEK- | | | | | | | | | | | | | |
| | Variant | chemical | 293 | | | | | | | | | | | | | |
| sgRNA | ## in | % | % | | | | | | | | | | | | | |
| Variant | Table 2 | Cleavage | Cleavage | Description | | | | | | | | | | | | |
| Control | | 91 | 58 | Control | | | A | G | G | G | A | C | A | G | | |
| GV-1 | | 94 | 21 | Lower Stem Variant | | | A | G | G | G | A | C | A | G | | |
| GV-2 | | 87 | 33 | Lower Stem Variant | | | A | G | G | G | A | C | A | G | | |
| GV-3 | 1 | 91 | 60 | Upper Stem Variant | | | A | G | G | G | A | C | A | G | | |
| GV-4 | | 94 | 34 | Upper and Lower | | | A | G | G | G | A | C | A | G | | |
| | | | | Stem Variant | | | | | | | | | | | | |
| GV-5 | | 94 | 48 | Upper and Lower | | | A | G | G | G | A | C | A | G | | |
| | | | | Stem Variant | | | | | | | | | | | | |
| GV-6 | | 92 | ND | Upper and Lower | | | A | G | G | G | A | C | A | G | | |
| | | | | Stem Variant | | | | | | | | | | | | |
| GV-7 | | 5 | 6 | Upper and Lower | | | A | G | G | G | A | C | A | G | | |
| | | | | Stem and Bulge Variant | | | | | | | | | | | | |
| GV-8 | | 95 | 0 | Upper and Lower | | | A | G | G | G | A | C | A | G | | |
| | | | | Stem and Bulge Variant | | | | | | | | | | | | |
| GV-9 | | 94 | ND | Lower Stem Variant | | | A | G | G | G | A | C | A | G | | |
| GV-10 | 3 | 91 | 61 | Lower Stem Variant | | | A | G | G | G | A | C | A | G | | |
| GV-11 | | 94 | 45 | Lower Stem Variant | | | A | G | G | G | A | C | A | G | | |
| GV-12 | 2 | 92 | 69 | Upper Stem Variant | | | A | G | G | G | A | C | A | G | | |
| GV-13 | 8 | 0 | 0 | Remove Bulge | | | A | G | G | G | A | C | A | G | | |
| GV-14 | | 0 | 0 | Remove Bulge | | | A | G | G | G | A | C | A | G | | |
| GV-15 | | 34 | 0 | Remove Upper | | | A | G | G | G | A | C | A | G | | |
| | | | | Stem and Bulge | | | | | | | | | | | | |
| GV-16 | 6 | 87 | 49 | Lower Stem 5′G change | | | A | G | G | G | A | C | A | G | | |
| GV-17 | 7 | 89 | 47 | Lower Stem 5′G change | | | A | G | G | G | A | C | A | G | | |
| GV-18 | | 0 | 0 | Upper and Lower | | | A | G | G | G | A | C | A | G | | |
| | | | | Stem and Bulge Variant | | | | | | | | | | | | |
| GV-19 | 5 | 93 | 26 | Upper and Lower | | | A | G | G | G | A | C | A | G | | |
| | | | | Stem Variant | | | | | | | | | | | | |
| GV-20 | | 0 | 0 | Bulge Variant | | | A | G | G | G | A | C | A | G | | |
| GV-21 | | 92 | 19 | Lower Stem Variant | | | A | G | G | G | A | C | A | G | | |
| GV-22 | 4 | 71 | 0 | Lower Stem Variant | | | A | G | G | G | A | C | A | G | | |
| GV-23 | | 99 | 0 | Lower Stem Variant | | | A | G | G | G | A | C | A | G | | |
| GV-24 | | 0 | 6 | Lower Stem Variant | | | A | G | G | G | A | C | A | G | | |
| GV-25 | | 88 | 0 | Lower Stem Variant | | | A | G | G | G | A | C | A | G | | |
| GV-26 | | 82 | 7 | Lower Stem Variant | | | A | G | G | G | A | C | A | G | | |
| GV-27 | 13 | 32 | 0 | Nexus Linker length | | | A | G | G | G | A | C | A | G | | |
| GV-28 | | 0 | 0 | Nexus Linker length | | | A | G | G | G | A | C | A | G | | |
| GV-29 | | 26 | 0 | Nexus Linker length | | | A | G | G | G | A | C | A | G | | |
| GV-30 | | 0 | 0 | Nexus Linker length | | | A | G | G | G | A | C | A | G | | |
| GV-31 | | 1 | 0 | Nexus Linker length | | | A | G | G | G | A | C | A | G | | |
| GV-32 | | 91 | 58 | Control | | | A | G | G | G | A | C | A | G | | |
| GV-33 | | 84 | 59 | Remove Upper Stem | | | A | G | G | G | A | C | A | G | | |
| GV-34 | 11 | 86 | 76 | Remove Upper | | | A | G | G | G | A | C | A | G | | |
| | | | | Stem and Loop | | | | | | | | | | | | |
| GV-35 | | 85 | 24 | Miniature sgRNA | | | A | G | G | G | A | C | A | G | | |
| GV-36 | | 3 | 0 | Miniature sgRNA | | | A | G | G | G | A | C | A | G | | |
| | sgRNA | Bio- | HEK- | | | | | | | | | | | | | |
| | Variant | chemical | 293 | | | | | | | | | | | | | |
| sgRNA | ## in | % | % | | | | | | | | | | | | | |
| Variant | Table 2 | Cleavage | Cleavage | Description | | | | | | Lower Stem | | | | | | |
| | | | | | | | | | | 21 | | | | | | |
| Control | | 91 | 58 | Control | | | G | A | U | G | U | U | U | U | | |
| GV-1 | | 94 | 21 | Lower Stem Variant | | | G | A | U | G | A | A | A | A | | |
| GV-2 | | 87 | 33 | Lower Stem Variant | | | G | A | U | G | A | U | A | U | | |
| GV-3 | 1 | 91 | 60 | Upper Stem Variant | | | G | A | U | G | U | U | U | U | | |
| GV-4 | | 94 | 34 | Upper and Lower | | | G | A | U | G | A | A | A | A | | |
| | | | | Stem Variant | | | | | | | | | | | | |
| GV-5 | | 94 | 48 | Upper and Lower | | | G | A | U | G | A | U | U | A | | |
| | | | | Stem Variant | | | | | | | | | | | | |
| GV-6 | | 92 | ND | Upper and Lower | | | G | A | U | G | U | A | A | U | | |
| | | | | Stem Variant | | | | | | | | | | | | |
| GV-7 | | 5 | 6 | Upper and Lower | | | G | A | U | G | A | A | A | A | | |
| | | | | Stem and Bulge Variant | | | | | | | | | | | | |
| GV-8 | | 95 | 0 | Upper and Lower | | | G | A | U | G | A | A | A | A | | |
| | | | | Stem and Bulge Variant | | | | | | | | | | | | |
| GV-9 | | 94 | ND | Lower Stem Variant | | | G | A | U | G | A | U | U | U | | |
| GV-10 | 3 | 91 | 61 | Lower Stem Variant | | | G | A | U | G | U | C | U | C | | |
| GV-11 | | 94 | 45 | Lower Stem Variant | | | G | A | U | G | U | C | C | C | | |
| GV-12 | 2 | 92 | 69 | Upper Stem Variant | | | G | A | U | G | U | U | U | U | | |
| GV-13 | 8 | 0 | 0 | Remove Bulge | | | G | A | U | G | U | U | U | U | | |
| GV-14 | | 0 | 0 | Remove Bulge | | | G | A | U | G | U | U | U | U | | |
| GV-15 | | 34 | 0 | Remove Upper | | | G | A | U | G | U | U | U | U | | |
| | | | | Stem and Bulge | | | | | | | | | | | | |
| GV-16 | 6 | 87 | 49 | Lower Stem 5′G change | | | G | A | U | A | U | U | U | U | | |
| GV-17 | 7 | 89 | 47 | Lower Stem 5′G change | | | G | A | U | A | U | U | U | U | | |
| GV-18 | | 0 | 0 | Upper and Lower | | | G | A | U | G | A | C | G | A | | |
| | | | | Stem and Bulge Variant | | | | | | | | | | | | |
| GV-19 | 5 | 93 | 26 | Upper and Lower | | | G | A | U | G | A | C | G | A | | |
| | | | | Stem Variant | | | | | | | | | | | | |
| GV-20 | | 0 | 0 | Bulge Variant | | | G | A | U | G | U | U | U | U | | |
| GV-21 | | 92 | 19 | Lower Stem Variant | | | G | A | U | C | G | U | U | U | | |
| GV-22 | 4 | 71 | 0 | Lower Stem Variant | | | G | A | U | G | U | G | G | U | | |
| GV-23 | | 99 | 0 | Lower Stem Variant | | | G | A | U | G | U | U | U | G | | |
| GV-24 | | 0 | 6 | Lower Stem Variant | | | G | A | U | G | U | U | U | U | | |
| GV-25 | | 88 | 0 | Lower Stem Variant | | | G | A | U | G | U | U | U | U | | |
| GV-26 | | 82 | 7 | Lower Stem Variant | | | G | A | U | G | U | U | U | U | | |
| GV-27 | 13 | 32 | 0 | Nexus Linker length | | | G | A | U | G | U | U | U | U | | |
| GV-28 | | 0 | 0 | Nexus Linker length | | | G | A | U | G | U | U | U | U | | |
| GV-29 | | 26 | 0 | Nexus Linker length | | | G | A | U | G | U | U | U | U | | |
| GV-30 | | 0 | 0 | Nexus Linker length | | | G | A | U | G | U | U | U | U | | |
| GV-31 | | 1 | 0 | Nexus Linker length | | | G | A | U | G | U | U | U | U | | |
| GV-32 | | 91 | 58 | Control | | | G | A | U | G | U | U | U | U | | |
| GV-33 | | 84 | 59 | Remove Upper Stem | | | G | A | U | G | U | U | U | U | | |
| GV-34 | 11 | 86 | 76 | Remove Upper | | | G | A | U | U | U | U | U | U | | |
| | | | | Stem and Loop | | | | | | | | | | | | |
| GV-35 | | 85 | 24 | Miniature sgRNA | | | G | A | U | G | U | U | U | U | | |
| GV-36 | | 3 | 0 | Miniature sgRNA | | | G | A | U | G | U | U | U | U | | |
| | sgRNA | Bio- | HEK- | | | | | | | | | | | | | |
| | Variant | chemical | 293 | | | | | | | | | | | | | |
| sgRNA | ## in | % | % | | | | | | | | | | | | | |
| Variant | Table 2 | Cleavage | Cleavage | Description | | | | Bulge | | | | Upper Stem | | | | |
| | | | | | | | | | | | | | | 31 | | |
| Control | | 91 | 58 | Control | | | A | G | A | — | — | G | C | U | A | |
| GV-1 | | 94 | 21 | Lower Stem Variant | | | A | G | A | — | — | G | C | U | A | |
| GV-2 | | 87 | 33 | Lower Stem Variant | | | A | G | A | — | — | G | C | U | A | |
| GV-3 | 1 | 91 | 60 | Upper Stem Variant | | | A | G | A | — | — | G | G | A | U | |
| GV-4 | | 94 | 34 | Upper and Lower | | | U | G | A | — | — | G | G | A | U | |
| | | | | Stem Variant | | | | | | | | | | | | |
| GV-5 | | 94 | 48 | Upper and Lower | | | U | G | A | — | — | G | G | A | U | |
| | | | | Stem Variant | | | | | | | | | | | | |
| GV-6 | | 92 | ND | Upper and Lower | | | U | G | A | — | — | G | G | A | U | |
| | | | | Stem Variant | | | | | | | | | | | | |
| GV-7 | | 5 | 6 | Upper and Lower | | | U | C | A | A | G | U | G | A | U | |
| | | | | Stem and Bulge Variant | | | | | | | | | | | | |
| GV-8 | | 95 | 0 | Upper and Lower | | | U | G | A | A | — | G | G | A | U | |
| | | | | Stem and Bulge Variant | | | | | | | | | | | | |
| GV-9 | | 94 | ND | Lower Stem Variant | | | A | G | A | — | — | G | C | U | A | |
| GV-10 | 3 | 91 | 61 | Lower Stem Variant | | | A | G | A | — | — | G | C | U | A | |
| GV-11 | | 94 | 45 | Lower Stem Variant | | | A | G | A | — | — | G | C | U | A | |
| GV-12 | 2 | 92 | 69 | Upper Stem Variant | | | A | G | A | — | — | C | U | C | A | |
| GV-13 | 8 | 0 | 0 | Remove Bulge | | | A | G | A | — | — | G | C | U | A | |
| GV-14 | | 0 | 0 | Remove Bulge | | | A | G | A | — | — | G | — | — | — | |
| GV-15 | | 34 | 0 | Remove Upper | | | A | — | — | — | — | — | — | — | — | |
| | | | | Stem and Bulge | | | | | | | | | | | | |
| GV-16 | 6 | 87 | 49 | Lower Stem 5′G change | | | A | G | A | — | — | G | C | U | A | |
| GV-17 | 7 | 89 | 47 | Lower Stem 5′G change | | | A | G | A | — | — | G | C | U | A | |
| GV-18 | | 0 | 0 | Upper and Lower | | | U | A | G | — | — | A | A | C | G | |
| | | | | Stem and Bulge Variant | | | | | | | | | | | | |
| GV-19 | 5 | 93 | 26 | Upper and Lower | | | U | G | A | — | — | G | A | C | G | |
| | | | | Stem Variant | | | | | | | | | | | | |
| GV-20 | | 0 | 0 | Bulge Variant | | | A | A | G | — | — | A | C | U | A | |
| GV-21 | | 92 | 19 | Lower Stem Variant | | | A | G | A | — | — | G | C | U | A | |
| GV-22 | 4 | 71 | 0 | Lower Stem Variant | | | A | G | A | — | — | G | C | U | A | |
| GV-23 | | 99 | 0 | Lower Stem Variant | | | C | G | A | — | — | G | C | U | A | |
| GV-24 | | 0 | 6 | Lower Stem Variant | | | A | G | A | — | — | G | U | G | A | |
| GV-25 | | 88 | 0 | Lower Stem Variant | | | A | G | A | — | — | G | C | U | A | |
| GV-26 | | 82 | 7 | Lower Stem Variant | | | A | G | A | — | — | G | C | U | A | |
| GV-27 | 13 | 32 | 0 | Nexus Linker length | | | A | G | A | — | — | G | C | U | A | |
| GV-28 | | 0 | 0 | Nexus Linker length | | | A | G | A | — | — | G | C | U | A | |
| GV-29 | | 26 | 0 | Nexus Linker length | | | A | G | A | — | — | G | C | U | A | |
| GV-30 | | 0 | 0 | Nexus Linker length | | | A | G | A | — | — | G | C | U | A | |
| GV-31 | | 1 | 0 | Nexus Linker length | | | A | G | A | — | — | G | C | U | A | |
| GV-32 | | 91 | 58 | Control | | | A | G | A | — | — | G | C | U | A | |
| GV-33 | | 84 | 59 | Remove Upper Stem | | | A | G | A | — | — | — | — | — | G | |
| GV-34 | 11 | 86 | 76 | Remove Upper | | | A | G | A | — | — | — | — | — | G | |
| | | | | Stem and Loop | | | | | | | | | | | | |
| GV-35 | | 85 | 24 | Miniature sgRNA | | | A | G | G | — | — | — | — | — | A | |
| GV-36 | | 3 | 0 | Miniature sgRNA | | | A | U | C | — | — | — | — | — | — | |
| | sgRNA | Bio- | HEK- | | | | | | | | | | | | | |
| | Variant | chemical | 293 | | | | | | | | | | | | | |
| sgRNA | ## in | % | % | | | | | | | | | | | | | |
| Variant | Table 2 | Cleavage | Cleavage | Description | | | | Loop | | | | Upper Stem | | | | |
| Control | | 91 | 58 | Control | | | | G | A | A | A | U | A | G | C | |
| GV-1 | | 94 | 21 | Lower Stem Variant | | | | G | A | A | A | U | A | G | C | |
| GV-2 | | 87 | 33 | Lower Stem Variant | | | | G | A | A | A | U | A | G | C | |
| GV-3 | 1 | 91 | 60 | Upper Stem Variant | | | | G | A | A | A | A | U | C | C | |
| GV-4 | | 94 | 34 | Upper and Lower | | | | G | A | A | A | A | U | C | C | |
| | | | | Stem Variant | | | | | | | | | | | | |
| GV-5 | | 94 | 48 | Upper and Lower | | | | G | A | A | A | A | U | C | C | |
| | | | | Stem Variant | | | | | | | | | | | | |
| GV-6 | | 92 | ND | Upper and Lower | | | | G | A | A | A | A | U | C | C | |
| | | | | Stem Variant | | | | | | | | | | | | |
| GV-7 | | 5 | 6 | Upper and Lower | | | | G | A | A | A | A | U | C | G | |
| | | | | Stem and Bulge Variant | | | | | | | | | | | | |
| GV-8 | | 95 | 0 | Upper and Lower | | | | G | A | A | A | A | U | C | C | |
| | | | | Stem and Bulge Variant | | | | | | | | | | | | |
| GV-9 | | 94 | ND | Lower Stem Variant | | | | G | A | A | A | U | A | G | C | |
| GV-10 | 3 | 91 | 61 | Lower Stem Variant | | | | G | A | A | A | U | A | G | C | |
| GV-11 | | 94 | 45 | Lower Stem Variant | | | | G | A | A | A | U | A | G | C | |
| GV-12 | 2 | 92 | 69 | Upper Stem Variant | | | | G | A | A | A | U | C | A | G | |
| GV-13 | 8 | 0 | 0 | Remove Bulge | | | | G | A | A | A | U | A | G | — | |
| GV-14 | | 0 | 0 | Remove Bulge | | | | G | A | A | A | — | — | — | — | |
| GV-15 | | 34 | 0 | Remove Upper | | | | G | A | A | A | — | — | — | — | |
| | | | | Stem and Bulge | | | | | | | | | | | | |
| GV-16 | 6 | 87 | 49 | Lower Stem 5′G change | | | | G | A | A | A | U | A | G | C | |
| GV-17 | 7 | 89 | 47 | Lower Stem 5′G change | | | | G | A | A | A | U | A | G | C | |
| GV-18 | | 0 | 0 | Upper and Lower | | | | G | A | A | A | C | G | U | U | |
| | | | | Stem and Bulge Variant | | | | | | | | | | | | |
| GV-19 | 5 | 93 | 26 | Upper and Lower | | | | G | A | A | A | C | G | U | C | |
| | | | | Stem Variant | | | | | | | | | | | | |
| GV-20 | | 0 | 0 | Bulge Variant | | | | G | A | A | A | U | A | G | U | |
| GV-21 | | 92 | 19 | Lower Stem Variant | | | | G | A | A | A | U | A | G | C | |
| GV-22 | 4 | 71 | 0 | Lower Stem Variant | | | | G | A | A | A | U | A | G | C | |
| GV-23 | | 99 | 0 | Lower Stem Variant | | | | G | A | A | A | U | A | G | C | |
| GV-24 | | 0 | 6 | Lower Stem Variant | | | | G | A | A | A | U | A | G | C | |
| GV-25 | | 88 | 0 | Lower Stem Variant | | | | G | A | A | A | U | A | G | C | |
| GV-26 | | 82 | 7 | Lower Stem Variant | | | | G | A | A | A | U | A | G | C | |
| GV-27 | 13 | 32 | 0 | Nexus Linker length | | | | G | A | A | A | U | A | G | C | |
| GV-28 | | 0 | 0 | Nexus Linker length | | | | G | A | A | A | U | A | G | C | |
| GV-29 | | 26 | 0 | Nexus Linker length | | | | G | A | A | A | U | A | G | C | |
| GV-30 | | 0 | 0 | Nexus Linker length | | | | G | A | A | A | U | A | G | C | |
| GV-31 | | 1 | 0 | Nexus Linker length | | | | G | A | A | A | U | A | G | C | |
| GV-32 | | 91 | 58 | Control | | | | G | A | A | A | U | A | G | C | |
| GV-33 | | 84 | 59 | Remove Upper Stem | | | | G | A | A | A | — | — | — | C | |
| GV-34 | 11 | 86 | 76 | Remove Upper | | | | — | — | — | A | — | — | — | C | |
| | | | | Stem and Loop | | | | | | | | | | | | |
| GV-35 | | 85 | 24 | Miniature sgRNA | | | | G | A | A | A | — | — | — | — | |
| GV-36 | | 3 | 0 | Miniature sgRNA | | | | G | A | A | A | — | — | — | — | |
| | sgRNA | Bio- | HEK- | | | | | | | | | | | | | |
| | Variant | chemical | 293 | | | | | | | | | | | | | |
| sgRNA | ## in | % | % | | | | | | | | | | | | | |
| Variant | Table 2 | Cleavage | Cleavage | Description | | | Bulge | | | | Lower Stem | | | | | |
| | | | | | | | 41 | | | | | | | | | |
| Control | | 91 | 58 | Control | | | A | A | G | U | U | A | A | A | A | U |
| GV-1 | | 94 | 21 | Lower Stem Variant | | | A | A | G | U | U | U | U | U | U | U |
| GV-2 | | 87 | 33 | Lower Stem Variant | | | A | A | G | U | U | A | U | A | U | U |
| GV-3 | 1 | 91 | 60 | Upper Stem Variant | | | A | A | G | U | U | A | A | A | A | U |
| GV-4 | | 94 | 34 | Upper and Lower | | | A | A | G | U | A | U | U | U | U | U |
| | | | | Stem Variant | | | | | | | | | | | | |
| GV-5 | | 94 | 48 | Upper and Lower | | | A | A | G | U | A | U | A | A | U | U |
| | | | | Stem Variant | | | | | | | | | | | | |
| GV-6 | | 92 | ND | Upper and Lower | | | A | A | G | U | A | A | U | U | A | U |
| | | | | Stem Variant | | | | | | | | | | | | |
| GV-7 | | 5 | 6 | Upper and Lower | | | A | G | — | — | A | U | U | U | U | U |
| | | | | Stem and Bulge Variant | | | | | | | | | | | | |
| GV-8 | | 95 | 0 | Upper and Lower | | | — | A | G | U | A | U | U | U | U | U |
| | | | | Stem and Bulge Variant | | | | | | | | | | | | |
| GV-9 | | 94 | ND | Lower Stem Variant | | | A | A | G | U | U | A | A | A | U | U |
| GV-10 | 3 | 91 | 61 | Lower Stem Variant | | | A | A | G | U | U | G | A | G | A | U |
| GV-11 | | 94 | 45 | Lower Stem Variant | | | A | A | G | U | U | G | G | G | A | U |
| GV-12 | 2 | 92 | 69 | Upper Stem Variant | | | A | A | G | U | U | A | A | A | A | U |
| GV-13 | 8 | 0 | 0 | Remove Bulge | | | — | C | U | C | U | A | A | A | A | U |
| GV-14 | | 0 | 0 | Remove Bulge | | | — | C | U | C | U | A | A | A | A | U |
| GV-15 | | 34 | 0 | Remove Upper | | | — | — | — | — | U | A | A | A | A | U |
| | | | | Stem and Bulge | | | | | | | | | | | | |
| GV-16 | 6 | 87 | 49 | Lower Stem 5′G change | | | A | A | G | U | U | A | A | A | A | U |
| GV-17 | 7 | 89 | 47 | Lower Stem 5′G change | | | A | A | G | U | U | A | A | A | A | C |
| GV-18 | | 0 | 0 | Upper and Lower | | | G | G | A | C | A | U | C | G | U | U |
| | | | | Stem and Bulge Variant | | | | | | | | | | | | |
| GV-19 | 5 | 93 | 26 | Upper and Lower | | | A | A | G | U | A | U | C | G | U | U |
| | | | | Stem Variant | | | | | | | | | | | | |
| GV-20 | | 0 | 0 | Bulge Variant | | | G | G | A | C | U | A | A | A | A | U |
| GV-21 | | 92 | 19 | Lower Stem Variant | | | A | A | G | U | U | A | A | A | A | U |
| GV-22 | 4 | 71 | 0 | Lower Stem Variant | | | A | A | G | U | U | A | A | A | A | U |
| GV-23 | | 99 | 0 | Lower Stem Variant | | | A | A | G | U | U | A | A | A | A | U |
| GV-24 | | 0 | 6 | Lower Stem Variant | | | A | A | G | U | U | C | A | C | A | U |
| GV-25 | | 88 | 0 | Lower Stem Variant | | | A | A | G | U | U | A | C | A | C | U |
| GV-26 | | 82 | 7 | Lower Stem Variant | | | A | A | G | U | U | A | A | C | A | G |
| GV-27 | 13 | 32 | 0 | Nexus Linker length | | | A | A | G | U | U | A | A | A | A | U |
| GV-28 | | 0 | 0 | Nexus Linker length | | | A | A | G | U | U | A | A | A | A | U |
| GV-29 | | 26 | 0 | Nexus Linker length | | | A | A | G | U | U | A | A | A | A | U |
| GV-30 | | 0 | 0 | Nexus Linker length | | | A | A | G | U | U | A | A | A | A | U |
| GV-31 | | 1 | 0 | Nexus Linker length | | | A | A | G | U | U | A | A | A | A | U |
| GV-32 | | 91 | 58 | Control | | | A | A | G | U | U | A | A | A | A | U |
| GV-33 | | 84 | 59 | Remove Upper Stem | | | A | A | G | U | U | A | A | A | A | U |
| GV-34 | 11 | 86 | 76 | Remove Upper | | | A | A | G | U | U | A | A | A | A | U |
| | | | | Stem and Loop | | | | | | | | | | | | |
| GV-35 | | 85 | 24 | Miniature sgRNA | | | — | C | U | U | U | A | A | A | A | U |
| GV-36 | | 3 | 0 | Miniature sgRNA | | | — | — | U | C | U | A | A | A | A | U |
| | sgRNA | Bio- | HEK- | | | | | | | | | | | | | |
| | Variant | chemical | 293 | | | | | | | | | | | | | |
| sgRNA | ## in | % | % | | | | | | | | | | | | | |
| Variant | Table 2 | Cleavage | Cleavage | Description | | | Spacer | | | | | | | | | |
| GV-37 | | 0 | 0 | Miniature sgRNA | | | G | G | G | G | C | C | A | C | U | |
| GV-38 | 12 | 83 | 33 | Remove Bulge mgRNA | | | G | G | G | G | C | C | A | C | U | |
| GV-39 | | 0 | 0 | Miniature sgRNA | | | G | G | G | G | C | C | A | C | U | |
| GV-40 | | 0 | 0 | Miniature sgRNA | | | G | G | G | G | C | C | A | C | U | |
| GV-41 | | 95 | 67 | Change Bulge angle | | | G | G | G | G | C | C | A | C | U | |
| GV-42 | 9 | 95 | 84 | Change Bulge angle | | | G | G | G | G | C | C | A | C | U | |
| GV-43 | | 91 | 72 | Change Bulge angle | | | G | G | G | G | C | C | A | C | U | |
| GV-44 | | 96 | 76 | Change Bulge angle | | | G | G | G | G | C | C | A | C | U | |
| GV-45 | | 95 | 87 | Change Bulge angle | | | G | G | G | G | C | C | A | C | U | |
| GV-46 | | 93 | 70 | Change Bulge angle | | | G | G | G | G | C | C | A | C | U | |
| GV-47 | 10 | 95 | 73 | Change Bulge angle | | | G | G | G | G | C | C | A | C | U | |
| GV-48 | | 96 | 72 | Control | | | G | G | G | G | C | C | A | C | U | |
| GV-49 | | 0 | 0 | Nexus Variant | | | G | G | G | G | C | C | A | C | U | |
| GV-50 | | 0 | 0 | Nexus Variant | | | G | G | G | G | C | C | A | C | U | |
| GV-51 | | 46 | 0 | Nexus Variant | | | G | G | G | G | C | C | A | C | U | |
| GV-52 | 18 | 94 | 45 | Nexus Variant | | | G | G | G | G | C | C | A | C | U | |
| GV-53 | | 0 | 0 | Nexus Variant | | | G | G | G | G | C | C | A | C | U | |
| GV-54 | 19 | 86 | 70 | Nexus Variant | | | G | G | G | G | G | C | A | C | U | |
| GV-55 | | 67 | 46 | Nexus Variant | | | G | G | G | G | C | C | A | C | U | |
| GV-56 | | 58 | 6 | Nexus Variant | | | G | G | G | G | C | C | A | C | U | |
| GV-57 | 14 | 0 | 0 | Nexus Variant | | | G | G | G | G | C | C | A | C | U | |
| GV-58 | | 4 | 0 | Nexus Variant | | | G | G | G | G | C | C | A | C | U | |
| GV-59 | | 26 | 0 | Nexus Variant | | | G | G | G | G | C | C | A | C | U | |
| GV-60 | | 87 | 0 | Nexus Variant | | | G | G | G | G | C | C | A | C | U | |
| GV-61 | | 94 | 7 | Nexus Variant | | | G | G | G | G | C | C | A | C | U | |
| GV-62 | 15 | 89 | 74 | Nexus Variant | | | G | G | G | G | C | C | A | C | U | |
| GV-63 | | 0 | 0 | Nexus Truncation | | | G | G | G | G | C | C | A | C | U | |
| GV-64 | | 0 | 0 | Nexus Truncation | | | G | G | G | G | C | C | A | C | U | |
| GV-65 | | 6 | 0 | Nexus Truncation | | | G | G | G | G | C | C | A | C | U | |
| GV-66 | 20 | 9 | 0 | Hairpin Truncation | | | G | G | G | G | C | C | A | C | U | |
| GV-67 | 17 | 20 | 0 | Nexus Stem Length | | | G | G | G | G | C | C | A | C | U | |
| GV-68 | | 80 | 0 | Nexus Stem Length | | | G | G | G | G | C | C | A | C | U | |
| GV-69 | | 60 | 4 | Nexus Stem Length | | | G | G | G | G | C | C | A | C | U | |
| GV-70 | | 77 | 11 | Nexus Stem Length | | | G | G | G | G | C | C | A | C | U | |
| GV-71 | | 94 | 11 | Nexus Stem Length | | | G | G | G | G | C | C | A | C | U | |
| GV-72 | | 86 | 63 | Control | | | G | G | G | G | C | C | A | C | U | |
| GV-73 | | 10 | 0 | Nexus Stem Length | | | G | G | G | G | C | C | A | C | U | |
| GV-74 | 16 | 89 | 38 | Nexus Stem Length | | | G | G | G | G | C | C | A | C | U | |
| GV-75 | | 2 | 0 | Nexus Variant | | | G | G | G | G | C | C | A | C | U | |
| | sgRNA | Bio- | HEK- | | | | | | | | | | | | | |
| | Variant | chemical | 293 | | | | | | | | | | | | | |
| sgRNA | ## in | % | % | | | | | | | | | | | | | |
| Variant | Table 2 | Cleavage | Cleavage | Description | | | | | | | | | | | | |
| GV-37 | | 0 | 0 | Miniature sgRNA | | | A | G | G | G | A | C | A | G | | |
| GV-38 | 12 | 83 | 33 | Remove Bulge mgRNA | | | A | G | G | G | A | C | A | G | | |
| GV-39 | | 0 | 0 | Miniature sgRNA | | | A | G | G | G | A | C | A | G | | |
| GV-40 | | 0 | 0 | Miniature sgRNA | | | A | G | G | G | A | C | A | G | | |
| GV-41 | | 95 | 67 | Change Bulge angle | | | A | G | G | G | A | C | A | G | | |
| GV-42 | 9 | 95 | 84 | Change Bulge angle | | | A | G | G | G | A | C | A | G | | |
| GV-43 | | 91 | 72 | Change Bulge angle | | | A | G | G | G | A | C | A | G | | |
| GV-44 | | 96 | 76 | Change Bulge angle | | | A | G | G | G | A | C | A | G | | |
| GV-45 | | 95 | 87 | Change Bulge angle | | | A | G | G | G | A | C | A | G | | |
| GV-46 | | 93 | 70 | Change Bulge angle | | | A | G | G | G | A | C | A | G | | |
| GV-47 | 10 | 95 | 73 | Change Bulge angle | | | A | G | G | G | A | C | A | G | | |
| GV-48 | | 96 | 72 | Control | | | A | G | G | G | A | C | A | G | | |
| GV-49 | | 0 | 0 | Nexus Variant | | | A | G | G | G | A | C | A | G | | |
| GV-50 | | 0 | 0 | Nexus Variant | | | A | G | G | G | A | C | A | G | | |
| GV-51 | | 46 | 0 | Nexus Variant | | | A | G | G | G | A | C | A | G | | |
| GV-52 | 18 | 94 | 45 | Nexus Variant | | | A | G | G | G | A | C | A | G | | |
| GV-53 | | 0 | 0 | Nexus Variant | | | A | G | G | G | A | C | A | G | | |
| GV-54 | 19 | 86 | 70 | Nexus Variant | | | A | G | G | G | A | C | A | G | | |
| GV-55 | | 67 | 46 | Nexus Variant | | | A | G | G | G | A | C | A | G | | |
| GV-56 | | 58 | 6 | Nexus Variant | | | A | G | G | G | A | C | A | G | | |
| GV-57 | 14 | 0 | 0 | Nexus Variant | | | A | G | G | G | A | C | A | G | | |
| GV-58 | | 4 | 0 | Nexus Variant | | | A | G | G | G | A | C | A | G | | |
| GV-59 | | 26 | 0 | Nexus Variant | | | A | G | G | G | A | C | A | G | | |
| GV-60 | | 87 | 0 | Nexus Variant | | | A | G | G | G | A | C | A | G | | |
| GV-61 | | 94 | 7 | Nexus Variant | | | A | G | G | G | A | C | A | G | | |
| GV-62 | 15 | 89 | 74 | Nexus Variant | | | A | G | G | G | A | C | A | G | | |
| GV-63 | | 0 | 0 | Nexus Truncation | | | A | G | G | G | A | C | A | G | | |
| GV-64 | | 0 | 0 | Nexus Truncation | | | A | G | G | G | A | C | A | G | | |
| GV-65 | | 6 | 0 | Nexus Truncation | | | A | G | G | G | A | C | A | G | | |
| GV-66 | 20 | 9 | 0 | Hairpin Truncation | | | A | G | G | G | A | C | A | G | | |
| GV-67 | 17 | 20 | 0 | Nexus Stem Length | | | A | G | G | G | A | C | A | G | | |
| GV-68 | | 80 | 0 | Nexus Stem Length | | | A | G | G | G | A | C | A | G | | |
| GV-69 | | 60 | 4 | Nexus Stem Length | | | A | G | G | G | A | C | A | G | | |
| GV-70 | | 77 | 11 | Nexus Stem Length | | | A | G | G | G | A | C | A | G | | |
| GV-71 | | 94 | 11 | Nexus Stem Length | | | A | G | G | G | A | C | A | G | | |
| GV-72 | | 86 | 63 | Control | | | A | G | G | G | A | C | A | G | | |
| GV-73 | | 10 | 0 | Nexus Stem Length | | | A | G | G | G | A | C | A | G | | |
| GV-74 | 16 | 89 | 38 | Nexus Stem Length | | | A | G | G | G | A | C | A | G | | |
| GV-75 | | 2 | 0 | Nexus Variant | | | A | G | G | G | A | C | A | G | | |
| | sgRNA | Bio- | HEK- | | | | | | | | | | | | | |
| | Variant | chemical | 293 | | | | | | | | | | | | | |
| sgRNA | ## in | % | % | | | | | | | | | | | | | |
| Variant | Table 2 | Cleavage | Cleavage | Description | | | | | | Lower Stem | | | | | | |
| GV-37 | | 0 | 0 | Miniature sgRNA | | | G | A | U | G | U | U | U | U | A | |
| GV-38 | 12 | 83 | 33 | Remove Bulge mgRNA | | | G | A | U | G | U | U | U | U | A | |
| GV-39 | | 0 | 0 | Miniature sgRNA | | | G | A | U | G | U | U | U | U | A | |
| GV-40 | | 0 | 0 | Miniature sgRNA | | | G | A | U | G | U | U | U | C | — | |
| GV-41 | | 95 | 67 | Change Bulge angle | | | G | A | U | G | U | U | U | U | A | |
| GV-42 | 9 | 95 | 84 | Change Bulge angle | | | G | A | U | G | U | U | U | U | A | |
| GV-43 | | 91 | 72 | Change Bulge angle | | | G | A | U | G | U | U | U | U | A | |
| GV-44 | | 96 | 76 | Change Bulge angle | | | G | A | U | G | U | U | U | U | A | |
| GV-45 | | 95 | 87 | Change Bulge angle | | | G | A | U | G | U | U | U | U | A | |
| GV-46 | | 93 | 70 | Change Bulge angle | | | G | A | U | G | U | U | U | U | A | |
| GV-47 | 10 | 95 | 73 | Change Bulge angle | | | G | A | U | G | U | U | U | U | A | |
| GV-48 | | 96 | 72 | Control | | | G | A | U | G | U | U | U | U | A | |
| GV-49 | | 0 | 0 | Nexus Variant | | | G | A | U | G | U | U | U | U | A | |
| GV-50 | | 0 | 0 | Nexus Variant | | | G | A | U | G | U | U | U | U | A | |
| GV-51 | | 46 | 0 | Nexus Variant | | | G | A | U | G | U | U | U | U | A | |
| GV-52 | 18 | 94 | 45 | Nexus Variant | | | G | A | U | G | U | U | U | U | A | |
| GV-53 | | 0 | 0 | Nexus Variant | | | G | A | U | G | U | U | U | U | A | |
| GV-54 | 19 | 86 | 70 | Nexus Variant | | | G | A | U | G | U | U | U | U | A | |
| GV-55 | | 67 | 46 | Nexus Variant | | | G | A | U | G | U | U | U | U | A | |
| GV-56 | | 58 | 6 | Nexus Variant | | | G | A | U | G | U | U | U | U | A | |
| GV-57 | 14 | 0 | 0 | Nexus Variant | | | G | A | U | G | U | U | U | U | A | |
| GV-58 | | 4 | 0 | Nexus Variant | | | G | A | U | G | U | U | U | U | A | |
| GV-59 | | 26 | 0 | Nexus Variant | | | G | A | U | G | U | U | U | U | A | |
| GV-60 | | 87 | 0 | Nexus Variant | | | G | A | U | G | U | U | U | U | A | |
| GV-61 | | 94 | 7 | Nexus Variant | | | G | A | U | G | U | U | U | U | A | |
| GV-62 | 15 | 89 | 74 | Nexus Variant | | | G | A | U | G | U | U | U | U | A | |
| GV-63 | | 0 | 0 | Nexus Truncation | | | G | A | U | G | U | U | U | U | A | |
| GV-64 | | 0 | 0 | Nexus Truncation | | | G | A | U | G | U | U | U | U | A | |
| GV-65 | | 6 | 0 | Nexus Truncation | | | G | A | U | G | U | U | U | U | A | |
| GV-66 | 20 | 9 | 0 | Hairpin Truncation | | | G | A | U | G | U | U | U | U | A | |
| GV-67 | 17 | 20 | 0 | Nexus Stem Length | | | G | A | U | G | U | U | U | U | A | |
| GV-68 | | 80 | 0 | Nexus Stem Length | | | G | A | U | G | U | U | U | U | A | |
| GV-69 | | 60 | 4 | Nexus Stem Length | | | G | A | U | G | U | U | U | U | A | |
| GV-70 | | 77 | 11 | Nexus Stem Length | | | G | A | U | G | U | U | U | U | A | |
| GV-71 | | 94 | 11 | Nexus Stem Length | | | G | A | U | G | U | U | U | U | A | |
| GV-72 | | 86 | 63 | Control | | | G | A | U | G | U | U | U | U | A | |
| GV-73 | | 10 | 0 | Nexus Stem Length | | | G | A | U | G | U | U | U | U | A | |
| GV-74 | 16 | 89 | 38 | Nexus Stem Length | | | G | A | U | G | U | U | U | U | A | |
| GV-75 | | 2 | 0 | Nexus Variant | | | G | A | U | G | U | U | U | U | A | |
| | sgRNA | Bio- | HEK- | | | | | | | | | | | | | |
| | Variant | chemical | 293 | | | | | | | | | | | | | |
| sgRNA | ## in | % | % | | | | | | | | | | | | | |
| Variant | Table 2 | Cleavage | Cleavage | Description | | | Bulge | | | | Upper Stem | | | | | |
| GV-37 | | 0 | 0 | Miniature sgRNA | | | C | — | — | — | — | — | — | — | | |
| GV-38 | 12 | 83 | 33 | Remove Bulge mgRNA | | | G | A | — | — | — | — | — | — | | |
| GV-39 | | 0 | 0 | Miniature sgRNA | | | U | C | — | — | — | — | — | — | | |
| GV-40 | | 0 | 0 | Miniature sgRNA | | | — | — | — | — | — | — | — | — | | |
| GV-41 | | 95 | 67 | Change Bulge angle | | | G | — | — | — | G | C | U | A | | |
| GV-42 | 9 | 95 | 84 | Change Bulge angle | | | — | — | — | — | G | C | U | A | | |
| GV-43 | | 91 | 72 | Change Bulge angle | | | — | — | — | — | — | C | U | A | | |
| GV-44 | | 96 | 76 | Change Bulge angle | | | G | A | — | — | G | C | U | A | | |
| GV-45 | | 95 | 87 | Change Bulge angle | | | G | A | — | — | G | C | U | A | | |
| GV-46 | | 93 | 70 | Change Bulge angle | | | G | A | — | — | G | C | U | A | | |
| GV-47 | 10 | 95 | 73 | Change Bulge angle | | | G | A | — | — | G | C | U | A | | |
| GV-48 | | 96 | 72 | Control | | | G | A | — | — | G | C | U | A | | |
| GV-49 | | 0 | 0 | Nexus Variant | | | G | A | — | — | G | C | U | A | | |
| GV-50 | | 0 | 0 | Nexus Variant | | | G | A | — | — | G | C | U | A | | |
| GV-51 | | 46 | 0 | Nexus Variant | | | G | A | — | — | G | C | U | A | | |
| GV-52 | 18 | 94 | 45 | Nexus Variant | | | G | A | — | — | G | C | U | A | | |
| GV-53 | | 0 | 0 | Nexus Variant | | | G | A | — | — | G | C | U | A | | |
| GV-54 | 19 | 86 | 70 | Nexus Variant | | | G | A | — | — | G | C | U | A | | |
| GV-55 | | 67 | 46 | Nexus Variant | | | G | A | — | — | G | C | U | A | | |
| GV-56 | | 58 | 6 | Nexus Variant | | | G | A | — | — | G | C | U | A | | |
| GV-57 | 14 | 0 | 0 | Nexus Variant | | | G | A | — | — | G | C | U | A | | |
| GV-58 | | 4 | 0 | Nexus Variant | | | G | A | — | — | G | C | U | A | | |
| GV-59 | | 26 | 0 | Nexus Variant | | | G | A | — | — | G | C | U | A | | |
| GV-60 | | 87 | 0 | Nexus Variant | | | G | A | — | — | G | C | U | A | | |
| GV-61 | | 94 | 7 | Nexus Variant | | | G | A | — | — | G | C | U | A | | |
| GV-62 | 15 | 89 | 74 | Nexus Variant | | | G | A | — | — | G | C | U | A | | |
| GV-63 | | 0 | 0 | Nexus Truncation | | | G | A | — | — | G | C | U | A | | |
| GV-64 | | 0 | 0 | Nexus Truncation | | | G | A | — | — | G | C | U | A | | |
| GV-65 | | 6 | 0 | Nexus Truncation | | | G | A | — | — | G | C | U | A | | |
| GV-66 | 20 | 9 | 0 | Hairpin Truncation | | | G | A | — | — | G | C | U | A | | |
| GV-67 | 17 | 20 | 0 | Nexus Stem Length | | | G | A | — | — | G | C | U | A | | |
| GV-68 | | 80 | 0 | Nexus Stem Length | | | G | A | — | — | G | C | U | A | | |
| GV-69 | | 60 | 4 | Nexus Stem Length | | | G | A | — | — | G | C | U | A | | |
| GV-70 | | 77 | 11 | Nexus Stem Length | | | G | A | — | — | G | C | U | A | | |
| GV-71 | | 94 | 11 | Nexus Stem Length | | | G | A | — | — | G | C | U | A | | |
| GV-72 | | 86 | 63 | Control | | | G | A | — | — | G | C | U | A | | |
| GV-73 | | 10 | 0 | Nexus Stem Length | | | G | A | — | — | G | C | U | A | | |
| GV-74 | 16 | 89 | 38 | Nexus Stem Length | | | G | A | — | — | G | C | U | A | | |
| GV-75 | | 2 | 0 | Nexus Variant | | | G | A | — | — | G | C | U | A | | |
| | sgRNA | Bio- | HEK- | | | | | | | | | | | | | |
| | Variant | chemical | 293 | | | | | | | | | | | | | |
| sgRNA | ## in | % | % | | | | | | | | | | | | | |
| Variant | Table 2 | Cleavage | Cleavage | Description | | | Loop | | | | Upper Stem | | | | | |
| GV-37 | | 0 | 0 | Miniature sgRNA | | | U | U | C | G | — | — | — | — | | |
| GV-38 | 12 | 83 | 33 | Remove Bulge mgRNA | | | — | — | U | A | — | — | — | — | | |
| GV-39 | | 0 | 0 | Miniature sgRNA | | | G | A | A | A | — | — | — | — | | |
| GV-40 | | 0 | 0 | Miniature sgRNA | | | U | U | C | G | — | — | — | — | | |
| GV-41 | | 95 | 67 | Change Bulge angle | | | G | A | A | A | U | A | G | C | | |
| GV-42 | 9 | 95 | 84 | Change Bulge angle | | | G | A | A | A | U | A | G | C | | |
| GV-43 | | 91 | 72 | Change Bulge angle | | | G | A | A | A | U | A | G | C | | |
| GV-44 | | 96 | 76 | Change Bulge angle | | | G | A | A | A | U | A | G | C | | |
| GV-45 | | 95 | 87 | Change Bulge angle | | | G | A | A | A | U | A | G | A | | |
| GV-46 | | 93 | 70 | Change Bulge angle | | | G | A | A | A | U | A | A | — | | |
| GV-47 | 10 | 95 | 73 | Change Bulge angle | | | G | A | A | A | U | A | — | — | | |
| GV-48 | | 96 | 72 | Control | | | G | A | A | A | U | A | G | C | | |
| GV-49 | | 0 | 0 | Nexus Variant | | | G | A | A | A | U | A | G | C | | |
| GV-50 | | 0 | 0 | Nexus Variant | | | G | A | A | A | U | A | G | C | | |
| GV-51 | | 46 | 0 | Nexus Variant | | | G | A | A | A | U | A | G | C | | |
| GV-52 | 18 | 94 | 45 | Nexus Variant | | | G | A | A | A | U | A | G | C | | |
| GV-53 | | 0 | 0 | Nexus Variant | | | G | A | A | A | U | A | G | C | | |
| GV-54 | 19 | 86 | 70 | Nexus Variant | | | G | A | A | A | U | A | G | C | | |
| GV-55 | | 67 | 46 | Nexus Variant | | | G | A | A | A | U | A | G | C | | |
| GV-56 | | 58 | 6 | Nexus Variant | | | G | A | A | A | U | A | G | C | | |
| GV-57 | 14 | 0 | 0 | Nexus Variant | | | G | A | A | A | U | A | G | C | | |
| GV-58 | | 4 | 0 | Nexus Variant | | | G | A | A | A | U | A | G | C | | |
| GV-59 | | 26 | 0 | Nexus Variant | | | G | A | A | A | U | A | G | C | | |
| GV-60 | | 87 | 0 | Nexus Variant | | | G | A | A | A | U | A | G | C | | |
| GV-61 | | 94 | 7 | Nexus Variant | | | G | A | A | A | U | A | G | C | | |
| GV-62 | 15 | 89 | 74 | Nexus Variant | | | G | A | A | A | U | A | G | C | | |
| GV-63 | | 0 | 0 | Nexus Truncation | | | G | A | A | A | U | A | G | C | | |
| GV-64 | | 0 | 0 | Nexus Truncation | | | G | A | A | A | U | A | G | C | | |
| GV-65 | | 6 | 0 | Nexus Truncation | | | G | A | A | A | U | A | G | C | | |
| GV-66 | 20 | 9 | 0 | Hairpin Truncation | | | G | A | A | A | U | A | G | C | | |
| GV-67 | 17 | 20 | 0 | Nexus Stem Length | | | G | A | A | A | U | A | G | C | | |
| GV-68 | | 80 | 0 | Nexus Stem Length | | | G | A | A | A | U | A | G | C | | |
| GV-69 | | 60 | 4 | Nexus Stem Length | | | G | A | A | A | U | A | G | C | | |
| GV-70 | | 77 | 11 | Nexus Stem Length | | | G | A | A | A | U | A | G | C | | |
| GV-71 | | 94 | 11 | Nexus Stem Length | | | G | A | A | A | U | A | G | C | | |
| GV-72 | | 86 | 63 | Control | | | G | A | A | A | U | A | G | C | | |
| GV-73 | | 10 | 0 | Nexus Stem Length | | | G | A | A | A | U | A | G | C | | |
| GV-74 | 16 | 89 | 38 | Nexus Stem Length | | | G | A | A | A | U | A | G | C | | |
| GV-75 | | 2 | 0 | Nexus Variant | | | G | A | A | A | U | A | G | C | | |
| | sgRNA | Bio- | HEK- | | | | | | | | | | | | | |
| | Variant | chemical | 293 | | | | | | | | | | | | | |
| sgRNA | ## in | % | % | | | | | | | | | | | | | |
| Variant | Table 2 | Cleavage | Cleavage | Description | | | Bulge | | | | Lower Stem | | | | | |
| GV-37 | | 0 | 0 | Miniature sgRNA | | | — | — | — | G | U | A | A | A | A | U |
| GV-38 | 12 | 83 | 33 | Remove Bulge mgRNA | | | — | — | C | U | U | A | A | A | A | U |
| GV-39 | | 0 | 0 | Miniature sgRNA | | | — | — | — | — | U | A | A | A | A | U |
| GV-40 | | 0 | 0 | Miniature sgRNA | | | — | — | — | — | — | G | A | A | A | U |
| GV-41 | | 95 | 67 | Change Bulge angle | | | A | A | G | U | U | A | A | A | A | U |
| GV-42 | 9 | 95 | 84 | Change Bulge angle | | | A | A | G | U | U | A | A | A | A | U |
| GV-43 | | 91 | 72 | Change Bulge angle | | | A | A | G | U | U | A | A | A | A | U |
| GV-44 | | 96 | 76 | Change Bulge angle | | | A | — | G | U | U | A | A | A | A | U |
| GV-45 | | 95 | 87 | Change Bulge angle | | | — | — | G | U | U | A | A | A | A | U |
| GV-46 | | 93 | 70 | Change Bulge angle | | | — | — | G | U | U | A | A | A | A | U |
| GV-47 | 10 | 95 | 73 | Change Bulge angle | | | — | — | G | U | U | A | A | A | A | U |
| GV-48 | | 96 | 72 | Control | | | A | A | G | U | U | A | A | A | A | U |
| GV-49 | | 0 | 0 | Nexus Variant | | | A | A | G | U | U | A | A | A | A | U |
| GV-50 | | 0 | 0 | Nexus Variant | | | A | A | G | U | U | A | A | A | A | U |
| GV-51 | | 46 | 0 | Nexus Variant | | | A | A | G | U | U | A | A | A | A | U |
| GV-52 | 18 | 94 | 45 | Nexus Variant | | | A | A | G | U | U | A | A | A | A | U |
| GV-53 | | 0 | 0 | Nexus Variant | | | A | A | G | U | U | A | A | A | A | U |
| GV-54 | 19 | 86 | 70 | Nexus Variant | | | A | A | G | U | U | A | A | A | A | U |
| GV-55 | | 67 | 46 | Nexus Variant | | | A | A | G | U | U | A | A | A | A | U |
| GV-56 | | 58 | 6 | Nexus Variant | | | A | A | G | U | U | A | A | A | A | U |
| GV-57 | 14 | 0 | 0 | Nexus Variant | | | A | A | G | U | U | A | A | A | A | U |
| GV-58 | | 4 | 0 | Nexus Variant | | | A | A | G | U | U | A | A | A | A | U |
| GV-59 | | 26 | 0 | Nexus Variant | | | A | A | G | U | U | A | A | A | A | U |
| GV-60 | | 87 | 0 | Nexus Variant | | | A | A | G | U | U | A | A | A | A | U |
| GV-61 | | 94 | 7 | Nexus Variant | | | A | A | G | U | U | A | A | A | A | U |
| GV-62 | 15 | 89 | 74 | Nexus Variant | | | A | A | G | U | U | A | A | A | A | U |
| GV-63 | | 0 | 0 | Nexus Truncation | | | A | A | G | U | U | A | A | A | A | U |
| GV-64 | | 0 | 0 | Nexus Truncation | | | A | A | G | U | U | A | A | A | A | U |
| GV-65 | | 6 | 0 | Nexus Truncation | | | A | A | G | U | U | A | A | A | A | U |
| GV-66 | 20 | 9 | 0 | Hairpin Truncation | | | A | A | G | U | U | A | A | A | A | U |
| GV-67 | 17 | 20 | 0 | Nexus Stem Length | | | A | A | G | U | U | A | A | A | A | U |
| GV-68 | | 80 | 0 | Nexus Stem Length | | | A | A | G | U | U | A | A | A | A | U |
| GV-69 | | 60 | 4 | Nexus Stem Length | | | A | A | G | U | U | A | A | A | A | U |
| GV-70 | | 77 | 11 | Nexus Stem Length | | | A | A | G | U | U | A | A | A | A | U |
| GV-71 | | 94 | 11 | Nexus Stem Length | | | A | A | G | U | U | A | A | A | A | U |
| GV-72 | | 86 | 63 | Control | | | A | A | G | U | U | A | A | A | A | U |
| GV-73 | | 10 | 0 | Nexus Stem Length | | | A | A | G | U | U | A | A | A | A | U |
| GV-74 | 16 | 89 | 38 | Nexus Stem Length | | | A | A | G | U | U | A | A | A | A | U |
| GV-75 | | 2 | 0 | Nexus Variant | | | A | A | G | U | U | A | A | A | A | U |
| | sgRNA | Bio- | HEK- | | | | | | | | | | | | | |
| | Variant | chemical | 293 | | | | | | | | | | | | | |
| sgRNA | ## in | % | % | | | | | | | | | | | | | |
| Variant | Table 2 | Cleavage | Cleavage | Description | | | Spacer | | | | | | | | | |
| GV-76 | | 55 | 0 | Nexus Variant | | | G | G | G | G | C | C | A | C | U | |
| GV-77 | | 5 | 0 | Nexus Variant | | | G | G | G | G | C | C | A | C | U | |
| GV-78 | | 96 | 56 | Control | | | G | G | G | G | C | C | A | C | U | |
| GV-79 | | 83 | 20 | Delete Hairpin 1 | | | G | G | G | G | C | C | A | C | U | |
| GV-80 | | 70 | 37 | Delete Hairpin 1 | | | G | G | G | G | C | C | A | C | U | |
| GV-81 | | 96 | 58 | Delete Hairpin 1 | | | G | G | G | G | C | C | A | C | U | |
| | sgRNA | Bio- | HEK- | | | | | | | | | | | | | |
| | Variant | chemical | 293 | | | | | | | | | | | | | |
| sgRNA | ## in | % | % | | | | | | | | | | | | | |
| Variant | Table 2 | Cleavage | Cleavage | Description | | | | | | | | | | | | |
| GV-76 | | 55 | 0 | Nexus Variant | | | A | G | G | G | A | C | A | G | G | |
| GV-77 | | 5 | 0 | Nexus Variant | | | A | G | G | G | A | C | A | G | G | |
| GV-78 | | 96 | 56 | Control | | | A | G | G | G | A | C | A | G | G | |
| GV-79 | | 83 | 20 | Delete Hairpin 1 | | | A | G | G | G | A | C | A | G | G | |
| GV-80 | | 70 | 37 | Delete Hairpin 1 | | | A | G | G | G | A | C | A | G | G | |
| GV-81 | | 96 | 58 | Delete Hairpin 1 | | | A | G | G | G | A | C | A | G | G | |
| | sgRNA | Bio- | HEK- | | | | | | | | | | | | | |
| | Variant | chemical | 293 | | | | | | | | | | | | | |
| sgRNA | ## in | % | % | | | | | | | | | | | | | |
| Variant | Table 2 | Cleavage | Cleavage | Description | | | | | Lower Stem | | | | | | | |
| GV-76 | | 55 | 0 | Nexus Variant | | | A | U | G | U | U | U | U | A | | |
| GV-77 | | 5 | 0 | Nexus Variant | | | A | U | G | U | U | U | U | A | | |
| GV-78 | | 96 | 56 | Control | | | A | U | G | U | U | U | U | A | | |
| GV-79 | | 83 | 20 | Delete Hairpin 1 | | | A | U | G | U | U | U | U | A | | |
| GV-80 | | 70 | 37 | Delete Hairpin 1 | | | A | U | G | U | U | U | U | A | | |
| GV-81 | | 96 | 58 | Delete Hairpin 1 | | | A | U | G | U | U | U | U | A | | |
| | sgRNA | Bio- | HEK- | | | | | | | | | | | | | |
| | Variant | chemical | 293 | | | | | | | | | | | | | |
| sgRNA | ## in | % | % | | | | | | | | | | | | | |
| Variant | Table 2 | Cleavage | Cleavage | Description | | | Bulge | | | | Upper Stem | | | | | |
| GV-76 | | 55 | 0 | Nexus Variant | | | G | A | — | — | G | C | U | A | | |
| GV-77 | | 5 | 0 | Nexus Variant | | | G | A | — | — | G | C | U | A | | |
| GV-78 | | 96 | 56 | Control | | | G | A | — | — | G | C | U | A | | |
| GV-79 | | 83 | 20 | Delete Hairpin 1 | | | G | A | — | — | G | C | U | A | | |
| GV-80 | | 70 | 37 | Delete Hairpin 1 | | | G | A | — | — | G | C | U | A | | |
| GV-81 | | 96 | 58 | Delete Hairpin 1 | | | G | A | — | — | G | C | U | A | | |
| | sgRNA | Bio- | HEK- | | | | | | | | | | | | | |
| | Variant | chemical | 293 | | | | | | | | | | | | | |
| sgRNA | ## in | % | % | | | | | | | | | | | | | |
| Variant | Table 2 | Cleavage | Cleavage | Description | | | Loop | | | | Upper Stem | | | | | |
| GV-76 | | 55 | 0 | Nexus Variant | | | G | A | A | A | U | A | G | C | | |
| GV-77 | | 5 | 0 | Nexus Variant | | | G | A | A | A | U | A | G | C | | |
| GV-78 | | 96 | 56 | Control | | | G | A | A | A | U | A | G | C | | |
| GV-79 | | 83 | 20 | Delete Hairpin 1 | | | G | A | A | A | U | A | G | C | | |
| GV-80 | | 70 | 37 | Delete Hairpin 1 | | | G | A | A | A | U | A | G | C | | |
| GV-81 | | 96 | 58 | Delete Hairpin 1 | | | G | A | A | A | U | A | G | C | | |
| | sgRNA | Bio- | HEK- | | | | | | | | | | | | | |
| | Variant | chemical | 293 | | | | | | | | | | | | | |
| sgRNA | ## in | % | % | | | | | | | | | | | | | |
| Variant | Table 2 | Cleavage | Cleavage | Description | | | Bulge | | | | Lower Stem | | | | | |
| GV-76 | | 55 | 0 | Nexus Variant | | | A | A | G | U | U | A | A | A | A | U |
| GV-77 | | 5 | 0 | Nexus Variant | | | A | A | G | U | U | A | A | A | A | U |
| GV-78 | | 96 | 56 | Control | | | A | A | G | U | U | A | A | A | A | U |
| GV-79 | | 83 | 20 | Delete Hairpin 1 | | | A | A | G | U | U | A | A | A | A | U |
| GV-80 | | 70 | 37 | Delete Hairpin 1 | | | A | A | G | U | U | A | A | A | A | U |
| GV-81 | | 96 | 58 | Delete Hairpin 1 | | | A | A | G | U | U | A | A | A | A | U |
| sgRNA | | | | | | | | | | | | | | | | |
| Variant | Nexus | | | | | | | | | | | | | | | |
| | 51 | | | | | | | | | | | | | | | |
| Control | A | A | — | — | — | — | — | — | G | G | — | — | — | | | |
| GV-1 | A | A | — | — | — | — | — | — | G | G | — | — | — | | | |
| GV-2 | A | A | — | — | — | — | — | — | G | G | — | — | — | | | |
| GV-3 | A | A | — | — | — | — | — | — | G | G | — | — | — | | | |
| GV-4 | A | A | — | — | — | — | — | — | G | G | — | — | — | | | |
| GV-5 | A | A | — | — | — | — | — | — | G | G | — | — | — | | | |
| GV-6 | A | A | — | — | — | — | — | — | G | G | — | — | — | | | |
| GV-7 | A | A | — | — | — | — | — | — | G | G | — | — | — | | | |
| GV-8 | A | A | — | — | — | — | — | — | G | G | — | — | — | | | |
| GV-9 | A | A | — | — | — | — | — | — | G | G | — | — | — | | | |
| GV-10 | A | A | — | — | — | — | — | — | G | G | — | — | — | | | |
| GV-11 | A | A | — | — | — | — | — | — | G | G | — | — | — | | | |
| GV-12 | A | A | — | — | — | — | — | — | G | G | — | — | — | | | |
| GV-13 | A | A | — | — | — | — | — | — | G | G | — | — | — | | | |
| GV-14 | A | A | — | — | — | — | — | — | G | G | — | — | — | | | |
| GV-15 | A | A | — | — | — | — | — | — | G | G | — | — | — | | | |
| GV-16 | A | A | — | — | — | — | — | — | G | G | — | — | — | | | |
| GV-17 | A | A | — | — | — | — | — | — | G | G | — | — | — | | | |
| GV-18 | A | A | — | — | — | — | — | — | G | G | — | — | — | | | |
| GV-19 | A | A | — | — | — | — | — | — | G | G | — | — | — | | | |
| GV-20 | A | A | — | — | — | — | — | — | G | G | — | — | — | | | |
| GV-21 | A | A | — | — | — | — | — | — | G | G | — | — | — | | | |
| GV-22 | A | A | — | — | — | — | — | — | G | G | — | — | — | | | |
| GV-23 | A | A | — | — | — | — | — | — | G | G | — | — | — | | | |
| GV-24 | A | A | — | — | — | — | — | — | G | G | — | — | — | | | |
| GV-25 | A | A | — | — | — | — | — | — | G | G | — | — | — | | | |
| GV-26 | A | A | — | — | — | — | — | — | G | G | — | — | — | | | |
| sgRNA | | | | | | | | | | | | | | | | |
| Vanant | | | | | | | | | | | | | | | | |
| | | | | | | | | | | 61 | | | | | | |
| Control | C | U | A | G | U | — | — | — | C | C | — | G | U | U | | |
| GV-1 | C | U | A | G | U | — | — | — | C | C | — | G | U | U | | |
| GV-2 | C | U | A | G | U | — | — | — | C | C | — | G | U | U | | |
| GV-3 | C | U | A | G | U | — | — | — | C | C | — | G | U | U | | |
| GV-4 | C | U | A | G | U | — | — | — | C | C | — | G | U | U | | |
| GV-5 | C | U | A | G | U | — | — | — | C | C | — | G | U | U | | |
| GV-6 | C | U | A | G | U | — | — | — | C | C | — | G | U | U | | |
| GV-7 | C | U | A | G | U | — | — | — | C | C | — | G | U | U | | |
| GV-8 | C | U | A | G | U | — | — | — | C | C | — | G | U | U | | |
| GV-9 | C | U | A | G | U | — | — | — | C | C | — | G | U | U | | |
| GV-10 | C | U | A | G | U | — | — | — | C | C | — | G | U | U | | |
| GV-11 | C | U | A | G | U | — | — | — | C | C | — | G | U | U | | |
| GV-12 | C | U | A | G | U | — | — | — | C | C | — | G | U | U | | |
| GV-13 | C | U | A | G | U | — | — | — | C | C | — | G | U | U | | |
| GV-14 | C | U | A | G | U | — | — | — | C | C | — | G | U | U | | |
| GV-15 | C | U | A | G | U | — | — | — | C | C | — | G | U | U | | |
| GV-16 | C | U | A | G | U | — | — | — | C | C | — | G | U | U | | |
| GV-17 | C | U | A | G | U | — | — | — | C | C | — | G | U | U | | |
| GV-18 | C | U | A | G | U | — | — | — | C | C | — | G | U | U | | |
| GV-19 | C | U | A | G | U | — | — | — | C | C | | G | U | U | | |
| GV-20 | C | U | A | G | U | — | — | — | C | C | — | G | U | U | | |
| GV-21 | C | U | A | G | U | — | — | — | C | C | — | G | U | U | | |
| GV-22 | C | U | A | G | U | — | — | — | C | C | — | G | U | U | | |
| GV-23 | C | U | A | G | U | — | — | — | C | C | — | G | U | U | | |
| GV-24 | C | U | A | G | U | — | — | — | C | C | — | G | U | U | | |
| GV-25 | C | U | A | G | U | — | — | — | C | C | — | G | U | U | | |
| GV-26 | C | U | A | G | U | — | — | — | C | C | — | G | U | U | | |
| sgRNA | | | | | | | | | | | | | | | | |
| Variant | Nexus | | | | | | | | | | | | | | | |
| | 51 | | | | | | | | | | | | | | | |
| GV-27 | A | A | — | — | — | — | C | U | G | G | — | — | — | C | | |
| GV-28 | — | — | — | — | — | — | — | — | — | G | — | — | — | C | | |
| GV-29 | A | A | — | — | — | C | U | C | G | G | — | — | — | C | | |
| GV-30 | A | A | — | — | C | U | C | U | G | G | — | — | — | C | | |
| GV-31 | A | A | C | U | C | U | C | U | G | G | — | — | — | C | | |
| GV-32 | A | A | — | — | — | — | — | — | G | G | — | — | — | C | | |
| GV-33 | A | A | — | — | — | — | — | — | G | G | — | — | — | C | | |
| GV-34 | A | A | — | — | — | — | — | — | G | G | — | — | — | C | | |
| GV-35 | A | A | — | — | — | — | — | — | G | G | — | — | — | C | | |
| GV-36 | A | A | — | — | — | — | — | — | G | G | — | — | — | C | | |
| GV-37 | A | A | — | — | — | — | — | — | G | G | — | — | — | C | | |
| GV-38 | A | A | — | — | — | — | — | — | G | G | — | — | — | C | | |
| GV-39 | A | A | — | — | — | — | — | — | G | G | — | — | — | C | | |
| GV-40 | A | A | — | — | — | — | — | — | G | G | — | — | — | C | | |
| GV-41 | A | A | — | — | — | — | — | — | G | G | — | — | — | C | | |
| GV-42 | A | A | — | — | — | — | — | — | G | G | — | — | — | C | | |
| GV-43 | A | A | — | — | — | — | — | — | G | G | — | — | — | C | | |
| GV-44 | A | A | — | — | — | — | — | — | G | G | — | — | — | C | | |
| GV-45 | A | A | — | — | — | — | — | — | G | G | — | — | — | C | | |
| GV-46 | A | A | — | — | — | — | — | — | G | G | — | — | — | C | | |
| GV-47 | A | A | — | — | — | — | — | — | G | G | — | — | — | C | | |
| GV-48 | A | A | — | — | — | — | — | — | G | G | — | — | — | C | | |
| GV-49 | G | G | — | — | — | — | — | — | A | A | — | — | — | C | | |
| GV-50 | U | U | — | — | — | — | — | — | C | G | — | — | — | C | | |
| GV-51 | A | A | — | — | — | — | — | — | G | C | — | — | — | G | | |
| GV-52 | A | A | — | — | — | — | — | — | G | G | — | — | — | C | | |
| GV-53 | A | A | — | — | — | — | — | — | G | G | — | — | — | C | | |
| GV-54 | A | A | — | — | — | — | — | — | G | G | — | — | — | C | | |
| GV-55 | A | A | — | — | — | — | — | — | G | G | — | — | — | C | | |
| GV-56 | A | A | — | — | — | — | — | — | G | G | — | — | — | C | | |
| GV-57 | A | A | — | — | — | — | — | — | C | C | — | — | — | C | | |
| GV-58 | A | A | — | — | — | — | — | — | C | C | — | — | — | C | | |
| GV-59 | A | A | — | — | — | — | — | — | G | G | — | — | — | C | | |
| GV-60 | A | A | — | — | — | — | — | — | G | G | — | — | — | C | | |
| GV-61 | A | A | — | — | — | — | — | — | G | G | — | — | — | C | | |
| GV-62 | A | A | — | — | — | — | — | — | G | A | — | — | — | C | | |
| GV-63 | A | A | — | — | — | — | — | — | G | G | — | — | — | — | | |
| GV-64 | A | A | — | — | — | — | — | — | G | G | — | — | — | C | | |
| GV-65 | A | A | — | — | — | — | — | — | G | G | — | — | — | C | | |
| sgRNA | | | | | | | | | | | | | | | | |
| Variant | | | | | | | | | | | | | | | | |
| | | | | | | | | | 61 | | | | | | | |
| GV-27 | U | A | G | U | — | — | — | C | C | — | G | U | U | | | |
| GV-28 | U | A | G | U | — | — | — | C | C | — | G | U | U | | | |
| GV-29 | U | A | G | U | — | — | — | C | C | — | G | U | U | | | |
| GV-30 | U | A | G | U | — | — | — | C | C | — | G | U | U | | | |
| GV-31 | U | A | G | U | — | — | — | C | C | — | G | U | U | | | |
| GV-32 | U | A | G | U | — | — | — | C | C | — | G | U | U | | | |
| GV-33 | U | A | G | U | — | — | — | C | C | — | G | U | U | | | |
| GV-34 | U | A | G | U | — | — | — | C | C | — | G | U | U | | | |
| GV-35 | U | A | G | U | — | — | — | C | C | — | G | U | U | | | |
| GV-36 | U | A | G | U | — | — | — | C | C | — | G | U | U | | | |
| GV-37 | U | A | G | U | — | — | — | C | C | — | G | U | U | | | |
| GV-38 | U | A | G | U | — | — | — | C | C | — | G | U | U | | | |
| GV-39 | U | A | G | U | — | — | — | C | C | — | G | U | U | | | |
| GV-40 | U | A | G | U | — | — | — | C | C | — | G | U | U | | | |
| GV-41 | U | A | G | U | — | — | — | C | C | — | G | U | U | | | |
| GV-42 | U | A | G | U | — | — | — | C | C | — | G | U | U | | | |
| GV-43 | U | A | G | U | — | — | — | C | C | — | G | U | U | | | |
| GV-44 | U | A | G | U | — | — | — | C | C | — | G | U | U | | | |
| GV-45 | U | A | G | U | — | — | — | C | C | — | G | U | U | | | |
| GV-46 | U | A | G | U | — | — | — | C | C | — | G | U | U | | | |
| GV-47 | U | A | G | U | — | — | — | C | C | — | G | U | U | | | |
| GV-48 | U | A | G | U | — | — | — | C | C | — | G | U | U | | | |
| GV-49 | U | A | G | U | — | — | — | C | C | — | G | U | U | | | |
| GV-50 | U | A | G | U | — | — | — | C | C | — | G | U | U | | | |
| GV-51 | A | A | G | U | — | — | — | C | C | — | G | U | U | | | |
| GV-52 | U | U | C | A | — | — | — | C | C | — | G | U | U | | | |
| GV-53 | U | A | G | U | — | — | — | G | G | — | C | U | U | | | |
| GV-54 | U | A | G | U | — | — | — | C | C | — | G | A | A | | | |
| GV-55 | U | A | G | U | — | — | — | C | C | — | G | U | U | | | |
| GV-56 | U | A | G | U | — | — | — | C | C | — | G | U | U | | | |
| GV-57 | U | A | G | U | — | — | — | C | C | — | G | U | U | | | |
| GV-58 | U | A | G | U | — | — | — | G | G | — | G | U | U | | | |
| GV-59 | U | A | G | U | — | — | — | G | G | — | G | U | U | | | |
| GV-60 | U | A | G | U | — | — | — | A | A | — | G | U | U | | | |
| GV-61 | U | A | G | U | — | — | — | U | U | — | G | U | U | | | |
| GV-62 | U | A | G | U | — | — | — | U | C | — | G | U | U | | | |
| GV-63 | — | — | — | — | — | — | — | — | — | — | — | — | — | | | |
| GV-64 | U | A | G | — | — | — | — | — | — | — | — | — | — | | | |
| GV-65 | U | A | G | U | — | — | — | C | G | — | G | — | — | | | |
| sgRNA | | | | | | | | | | | | | | | | |
| Variant | Nexus | | | | | | | | | | | | | | | |
| | 51 | | | | | | | | | | | | | | | |
| GV-66 | A | A | — | — | — | — | — | — | G | G | — | — | — | | | |
| GV-67 | A | A | — | — | — | — | — | — | G | G | — | — | G | | | |
| GV-68 | A | A | — | — | — | — | — | — | G | G | — | G | G | | | |
| GV-69 | A | A | — | — | — | — | — | — | G | G | G | G | G | | | |
| GV-70 | A | A | — | — | — | — | — | — | A | A | — | — | — | | | |
| GV-71 | A | A | — | — | — | — | — | — | G | G | — | — | A | | | |
| GV-72 | A | A | — | — | — | — | — | — | G | G | — | — | — | | | |
| GV-73 | A | A | — | — | — | — | — | — | G | G | — | — | — | | | |
| GV-74 | A | A | — | — | — | — | — | — | A | G | — | — | — | | | |
| GV-75 | A | A | — | — | — | — | — | — | G | G | — | — | U | | | |
| GV-76 | A | A | — | — | — | — | — | — | G | G | — | U | A | | | |
| GV-77 | A | A | — | — | — | — | — | — | G | G | U | A | U | | | |
| GV-78 | A | A | — | — | — | — | — | — | G | G | — | — | — | | | |
| GV-79 | A | A | — | — | — | — | — | — | G | G | — | — | — | | | |
| GV-80 | A | A | — | — | — | — | — | — | G | G | — | — | — | | | |
| GV-81 | A | A | — | — | — | — | — | — | G | G | — | — | — | | | |
| sgRNA | | | | | | | | | | | | | | | | |
| Variant | | | | | | | | | | | | | | | | |
| | | | | | | | | | | 61 | | | | | | |
| GV-66 | C | U | A | G | U | — | — | — | C | C | — | G | U | U | | |
| GV-67 | C | U | A | G | U | C | — | — | C | C | — | G | U | U | | |
| GV-68 | C | U | A | G | U | C | C | — | C | C | — | G | U | U | | |
| GV-69 | C | U | A | G | U | C | C | C | C | C | — | G | U | U | | |
| GV-70 | C | U | A | G | U | — | — | — | U | U | — | G | U | U | | |
| GV-71 | C | U | A | G | U | U | — | — | C | C | — | G | U | U | | |
| GV-72 | C | U | A | G | U | — | — | — | C | C | — | G | U | U | | |
| GV-73 | C | U | A | G | U | — | — | — | C | C | U | G | U | U | | |
| GV-74 | C | U | A | G | U | — | — | — | C | U | — | G | U | U | | |
| GV-75 | C | U | A | G | U | C | — | — | C | C | — | G | U | U | | |
| GV-76 | C | U | A | G | U | C | G | — | C | C | — | G | U | U | | |
| GV-77 | C | U | A | G | U | G | C | G | C | C | — | G | U | U | | |
| GV-78 | C | U | A | G | U | — | — | — | C | C | — | G | U | U | | |
| GV-79 | C | U | A | G | U | — | — | — | C | C | — | G | U | U | | |
| GV-80 | C | U | A | G | U | — | — | — | C | C | — | G | U | U | | |
| GV-81 | C | U | A | G | U | — | — | — | C | C | — | G | U | U | | |
| sgRNA | | | | | | | | | | | | | | | | |
| Variant | Hairpins | | | | | | | | | | | | | | | |
| | | | | | | | 71 | | | | | | | | | |
| Control | A | U | C | A | A | C | U | U | G | A | A | | | | | |
| GV-1 | A | U | C | A | A | C | U | U | G | A | A | | | | | |
| GV-2 | A | U | C | A | A | C | U | U | G | A | A | | | | | |
| GV-3 | A | U | C | A | A | C | U | U | G | A | A | | | | | |
| GV-4 | A | U | C | A | A | C | U | U | G | A | A | | | | | |
| GV-5 | A | U | C | A | A | C | U | U | G | A | A | | | | | |
| GV-6 | A | U | C | A | A | C | U | U | G | A | A | | | | | |
| GV-7 | A | U | C | A | A | C | U | U | G | A | A | | | | | |
| GV-8 | A | U | C | A | A | C | U | U | G | A | A | | | | | |
| GV-9 | A | U | C | A | A | C | U | U | G | A | A | | | | | |
| GV-10 | A | U | C | A | A | C | U | U | G | A | A | | | | | |
| GV-11 | A | U | C | A | A | C | U | U | G | A | A | | | | | |
| GV-12 | A | U | C | A | A | C | U | U | G | A | A | | | | | |
| GV-13 | A | U | C | A | A | C | U | U | G | A | A | | | | | |
| GV-14 | A | U | C | A | A | C | U | U | G | A | A | | | | | |
| GV-15 | A | U | C | A | A | C | U | U | G | A | A | | | | | |
| GV-16 | A | U | C | A | A | C | U | U | G | A | A | | | | | |
| GV-17 | A | U | C | A | A | C | U | U | G | A | A | | | | | |
| GV-18 | A | U | C | A | A | C | U | U | G | A | A | | | | | |
| GV-19 | A | U | C | A | A | C | U | U | G | A | A | | | | | |
| GV-20 | A | U | C | A | A | C | U | U | G | A | A | | | | | |
| GV-21 | A | U | C | A | A | C | U | U | G | A | A | | | | | |
| GV-22 | A | U | C | A | A | C | U | U | G | A | A | | | | | |
| GV-23 | A | U | C | A | A | C | U | U | G | A | A | | | | | |
| GV-24 | A | U | C | A | A | C | U | U | G | A | A | | | | | |
| GV-25 | A | U | C | A | A | C | U | U | G | A | A | | | | | |
| GV-26 | A | U | C | A | A | C | U | U | G | A | A | | | | | |
| GV-27 | A | U | C | A | A | C | U | U | G | A | A | | | | | |
| GV-28 | A | U | C | A | A | C | U | U | G | A | A | | | | | |
| GV-29 | A | U | C | A | A | C | U | U | G | A | A | | | | | |
| GV-30 | A | U | C | A | A | C | U | U | G | A | A | | | | | |
| GV-31 | A | U | C | A | A | C | U | U | G | A | A | | | | | |
| GV-32 | A | U | C | A | A | C | U | U | G | A | A | | | | | |
| GV-33 | A | U | C | A | A | C | U | U | G | A | A | | | | | |
| GV-34 | A | U | C | A | A | C | U | U | G | A | A | | | | | |
| GV-35 | A | U | C | A | A | C | U | U | G | A | A | | | | | |
| GV-36 | A | U | C | A | A | C | U | U | G | A | A | | | | | |
| sgRNA | | | | | | | | | | | | | | | | |
| Variant | | | | | | | | | | | | | | | | |
| | | | | | | 81 | | | | | | | | | | |
| Control | A | A | A | G | U | G | G | C | A | C | C | | | | | |
| GV-1 | A | A | A | G | U | G | G | C | A | C | C | | | | | |
| GV-2 | A | A | A | G | U | G | G | C | A | C | C | | | | | |
| GV-3 | A | A | A | G | U | G | G | C | A | C | C | | | | | |
| GV-4 | A | A | A | G | U | G | G | C | A | C | C | | | | | |
| GV-5 | A | A | A | G | U | G | G | C | A | C | C | | | | | |
| GV-6 | A | A | A | G | U | G | G | C | A | C | C | | | | | |
| GV-7 | A | A | A | G | U | G | G | C | A | C | C | | | | | |
| GV-8 | A | A | A | G | U | G | G | C | A | C | C | | | | | |
| GV-9 | A | A | A | G | U | G | G | C | A | C | C | | | | | |
| GV-10 | A | A | A | G | U | G | G | C | A | C | C | | | | | |
| GV-11 | A | A | A | G | U | G | G | C | A | C | C | | | | | |
| GV-12 | A | A | A | G | U | G | G | C | A | C | C | | | | | |
| GV-13 | A | A | A | G | U | G | G | C | A | C | C | | | | | |
| GV-14 | A | A | A | G | U | G | G | C | A | C | C | | | | | |
| GV-15 | A | A | A | G | U | G | G | C | A | C | C | | | | | |
| GV-16 | A | A | A | G | U | G | G | C | A | C | C | | | | | |
| GV-17 | A | A | A | G | U | G | G | C | A | C | C | | | | | |
| GV-18 | A | A | A | G | U | G | G | C | A | C | C | | | | | |
| GV-19 | A | A | A | G | U | G | G | C | A | C | C | | | | | |
| GV-20 | A | A | A | G | U | G | G | C | A | C | C | | | | | |
| GV-21 | A | A | A | G | U | G | G | C | A | C | C | | | | | |
| GV-22 | A | A | A | G | U | G | G | C | A | C | C | | | | | |
| GV-23 | A | A | A | G | U | G | G | C | A | C | C | | | | | |
| GV-24 | A | A | A | G | U | G | G | C | A | C | C | | | | | |
| GV-25 | A | A | A | G | U | G | G | C | A | C | C | | | | | |
| GV-26 | A | A | A | G | U | G | G | C | A | C | C | | | | | |
| GV-27 | A | A | A | G | U | G | G | C | A | C | C | | | | | |
| GV-28 | A | A | A | G | U | G | G | C | A | C | C | | | | | |
| GV-29 | A | A | A | G | U | G | G | C | A | C | C | | | | | |
| GV-30 | A | A | A | G | U | G | G | C | A | C | C | | | | | |
| GV-31 | A | A | A | G | U | G | G | C | A | C | C | | | | | |
| GV-32 | A | A | A | G | U | G | G | C | A | C | C | | | | | |
| GV-33 | A | A | A | G | U | G | G | C | A | C | C | | | | | |
| GV-34 | A | A | A | G | U | G | G | C | A | C | C | | | | | |
| GV-35 | A | A | A | G | U | G | G | C | A | C | C | | | | | |
| GV-36 | A | A | A | G | U | G | G | C | A | C | C | | | | | |
| sgRNA | | | | | | | | | | | | | | | | |
| Variant | | | | | | | | | | | | | | | | |
| | | | | | 91 | | | | | | | | | | | |
| Control | G | A | G | U | C | G | G | U | G | | | | | | | |
| GV-1 | G | A | G | U | C | G | G | U | G | | | | | | | |
| GV-2 | G | A | G | U | C | G | G | U | G | | | | | | | |
| GV-3 | G | A | G | U | C | G | G | U | G | | | | | | | |
| GV-4 | G | A | G | U | C | G | G | U | G | | | | | | | |
| GV-5 | G | A | G | U | C | G | G | U | G | | | | | | | |
| GV-6 | G | A | G | U | C | G | G | U | G | | | | | | | |
| GV-7 | G | A | G | U | C | G | G | U | G | | | | | | | |
| GV-8 | G | A | G | U | C | G | G | U | G | | | | | | | |
| GV-9 | G | A | G | U | C | G | G | U | G | | | | | | | |
| GV-10 | G | A | G | U | C | G | G | U | G | | | | | | | |
| GV-11 | G | A | G | U | C | G | G | U | G | | | | | | | |
| GV-12 | G | A | G | U | C | G | G | U | G | | | | | | | |
| GV-13 | G | A | G | U | C | G | G | U | G | | | | | | | |
| GV-14 | G | A | G | U | C | G | G | U | G | | | | | | | |
| GV-15 | G | A | G | U | C | G | G | U | G | | | | | | | |
| GV-16 | G | A | G | U | C | G | G | U | G | | | | | | | |
| GV-17 | G | A | G | U | C | G | G | U | G | | | | | | | |
| GV-18 | G | A | G | U | C | G | G | U | G | | | | | | | |
| GV-19 | G | A | G | U | C | G | G | U | G | | | | | | | |
| GV-20 | G | A | G | U | C | G | G | U | G | | | | | | | |
| GV-21 | G | A | G | U | C | G | G | U | G | | | | | | | |
| GV-22 | G | A | G | U | C | G | G | U | G | | | | | | | |
| GV-23 | G | A | G | U | C | G | G | U | G | | | | | | | |
| GV-24 | G | A | G | U | C | G | G | U | G | | | | | | | |
| GV-25 | G | A | G | U | C | G | G | U | G | | | | | | | |
| GV-26 | G | A | G | U | C | G | G | U | G | | | | | | | |
| GV-27 | G | A | G | U | C | G | G | U | G | | | | | | | |
| GV-28 | G | A | G | U | C | G | G | U | G | | | | | | | |
| GV-29 | G | A | G | U | C | G | G | U | G | | | | | | | |
| GV-30 | G | A | G | U | C | G | G | U | G | | | | | | | |
| GV-31 | G | A | G | U | C | G | G | U | G | | | | | | | |
| GV-32 | G | A | G | U | C | G | G | U | G | | | | | | | |
| GV-33 | G | A | G | U | C | G | G | U | G | | | | | | | |
| GV-34 | G | A | G | U | C | G | G | U | G | | | | | | | |
| GV-35 | G | A | G | U | C | G | G | U | G | | | | | | | |
| GV-36 | G | A | G | U | C | G | G | U | G | | | | | | | |
| sgRNA | | | | | | | | | | | | | | | | |
| Variant | | | | | | | | | | | | | | | | |
| | | | | | | 101 | | | | | | | | | | |
| Control | C | U | U | U | U | U | U | U | U | | | | | | | |
| GV-1 | C | U | U | U | U | U | U | U | U | | | | | | | |
| GV-2 | C | U | U | U | U | U | U | U | U | | | | | | | |
| GV-3 | C | U | U | U | U | U | U | U | U | | | | | | | |
| GV-4 | C | U | U | U | U | U | U | U | U | | | | | | | |
| GV-5 | C | U | U | U | U | U | U | U | U | | | | | | | |
| GV-6 | C | U | U | U | U | U | U | U | U | | | | | | | |
| GV-7 | C | U | U | U | U | U | U | U | U | | | | | | | |
| GV-8 | C | U | U | U | U | U | U | U | U | | | | | | | |
| GV-9 | C | U | U | U | U | U | U | U | U | | | | | | | |
| GV-10 | C | U | U | U | U | U | U | U | U | | | | | | | |
| GV-11 | C | U | U | U | U | U | U | U | U | | | | | | | |
| GV-12 | C | U | U | U | U | U | U | U | U | | | | | | | |
| GV-13 | C | U | U | U | U | U | U | U | U | | | | | | | |
| GV-14 | C | U | U | U | U | U | U | U | U | | | | | | | |
| GV-15 | C | U | U | U | U | U | U | U | U | | | | | | | |
| GV-16 | C | U | U | U | U | U | U | U | U | | | | | | | |
| GV-17 | C | U | U | U | U | U | U | U | U | | | | | | | |
| GV-18 | C | U | U | U | U | U | U | U | U | | | | | | | |
| GV-19 | C | U | U | U | U | U | U | U | U | | | | | | | |
| GV-20 | C | U | U | U | U | U | U | U | U | | | | | | | |
| GV-21 | C | U | U | U | U | U | U | U | U | | | | | | | |
| GV-22 | C | U | U | U | U | U | U | U | U | | | | | | | |
| GV-23 | C | U | U | U | U | U | U | U | U | | | | | | | |
| GV-24 | C | U | U | U | U | U | U | U | U | | | | | | | |
| GV-25 | C | U | U | U | U | U | U | U | U | | | | | | | |
| GV-26 | C | U | U | U | U | U | U | U | U | | | | | | | |
| GV-27 | C | U | U | U | U | U | U | U | U | | | | | | | |
| GV-28 | C | U | U | U | U | U | U | U | U | | | | | | | |
| GV-29 | C | U | U | U | U | U | U | U | U | | | | | | | |
| GV-30 | C | U | U | U | U | U | U | U | U | | | | | | | |
| GV-31 | C | U | U | U | U | U | U | U | U | | | | | | | |
| GV-32 | C | U | U | U | U | U | U | U | U | | | | | | | |
| GV-33 | C | U | U | U | U | U | U | U | U | | | | | | | |
| GV-34 | C | U | U | U | U | U | U | U | U | | | | | | | |
| GV-35 | C | U | U | U | U | U | U | U | U | | | | | | | |
| GV-36 | C | U | U | U | U | U | U | U | U | | | | | | | |
| sgRNA | | | | | | | | | | | | | | | | |
| Variant | Hairpins | | | | | | | | | | | | | | | |
| | | | | | | | 71 | | | | | | | | | |
| GV-37 | A | U | C | A | A | C | U | U | G | A | | | | | | |
| GV-38 | A | U | C | A | A | C | U | U | G | A | | | | | | |
| GV-39 | A | U | C | A | A | C | U | U | G | A | | | | | | |
| GV-40 | A | U | C | A | A | C | U | U | G | A | | | | | | |
| GV-41 | A | U | C | A | A | C | U | U | G | A | | | | | | |
| GV-42 | A | U | C | A | A | C | U | U | G | A | | | | | | |
| GV-43 | A | U | C | A | A | C | U | U | G | A | | | | | | |
| GV-44 | A | U | C | A | A | C | U | U | G | A | | | | | | |
| GV-45 | A | U | C | A | A | C | U | U | G | A | | | | | | |
| GV-46 | A | U | C | A | A | C | U | U | G | A | | | | | | |
| GV-47 | A | U | C | A | A | C | U | U | G | A | | | | | | |
| GV-48 | A | U | C | A | A | C | U | U | G | A | | | | | | |
| GV-49 | A | U | C | A | A | C | U | U | G | A | | | | | | |
| GV-50 | A | U | C | A | A | C | U | U | G | A | | | | | | |
| GV-51 | A | U | C | A | A | C | U | U | G | A | | | | | | |
| GV-52 | A | U | C | A | A | C | U | U | G | A | | | | | | |
| GV-53 | A | U | C | A | A | C | U | U | G | A | | | | | | |
| GV-54 | U | U | C | A | A | C | U | U | G | A | | | | | | |
| GV-55 | A | A | G | U | A | C | U | U | G | A | | | | | | |
| GV-56 | A | U | C | A | U | G | A | U | G | A | | | | | | |
| GV-57 | A | U | C | A | A | C | U | U | G | A | | | | | | |
| GV-58 | A | U | C | A | A | C | U | U | G | A | | | | | | |
| GV-59 | A | U | C | A | A | C | U | U | G | A | | | | | | |
| GV-60 | A | U | C | A | A | C | U | U | G | A | | | | | | |
| GV-61 | A | U | C | A | A | C | U | U | G | A | | | | | | |
| GV-62 | A | U | C | A | A | C | U | U | G | A | | | | | | |
| GV-63 | — | — | — | — | — | — | — | — | — | — | | | | | | |
| GV-64 | — | — | — | — | — | — | — | — | — | — | | | | | | |
| GV-65 | — | — | — | — | — | — | — | — | — | — | | | | | | |
| GV-66 | A | U | — | — | — | — | — | — | — | — | | | | | | |
| GV-67 | A | U | C | A | A | C | U | U | G | A | | | | | | |
| GV-68 | A | U | C | A | A | C | U | U | G | A | | | | | | |
| GV-69 | A | U | C | A | A | C | U | U | G | A | | | | | | |
| GV-70 | A | U | C | A | A | C | U | U | G | A | | | | | | |
| GV-71 | A | U | C | A | A | C | U | U | G | A | | | | | | |
| GV-72 | A | U | C | A | A | C | U | U | G | A | | | | | | |
| GV-73 | A | U | C | A | A | C | U | U | G | A | | | | | | |
| GV-74 | A | U | C | A | A | C | U | U | G | A | | | | | | |
| sgRNA | | | | | | | | | | | | | | | | |
| Variant | | | | | | | | | | | | | | | | |
| | | | | | | | 81 | | | | | | | | | |
| GV-37 | A | A | A | A | G | U | G | G | C | A | | | | | | |
| GV-38 | A | A | A | A | G | U | G | G | C | A | | | | | | |
| GV-39 | A | A | A | A | G | U | G | G | C | A | | | | | | |
| GV-40 | A | A | A | A | G | U | G | G | C | A | | | | | | |
| GV-41 | A | A | A | A | G | U | G | G | C | A | | | | | | |
| GV-42 | A | A | A | A | G | U | G | G | C | A | | | | | | |
| GV-43 | A | A | A | A | G | U | G | G | C | A | | | | | | |
| GV-44 | A | A | A | A | G | U | G | G | C | A | | | | | | |
| GV-45 | A | A | A | A | G | U | G | G | C | A | | | | | | |
| GV-46 | A | A | A | A | G | U | G | G | C | A | | | | | | |
| GV-47 | A | A | A | A | G | U | G | G | C | A | | | | | | |
| GV-48 | A | A | A | A | G | U | G | G | C | A | | | | | | |
| GV-49 | A | A | A | A | G | U | G | G | C | A | | | | | | |
| GV-50 | A | A | A | A | G | U | G | G | C | A | | | | | | |
| GV-51 | A | A | A | A | G | U | G | G | C | A | | | | | | |
| GV-52 | A | A | A | A | G | U | G | G | C | A | | | | | | |
| GV-53 | A | A | A | A | G | U | G | G | C | A | | | | | | |
| GV-54 | A | A | A | A | G | U | G | G | C | A | | | | | | |
| GV-55 | A | A | A | A | G | U | G | G | C | A | | | | | | |
| GV-56 | A | A | A | A | G | U | G | G | C | A | | | | | | |
| GV-57 | A | A | A | A | G | U | G | G | C | A | | | | | | |
| GV-58 | A | A | A | A | G | U | G | G | C | A | | | | | | |
| GV-59 | A | A | A | A | G | U | G | G | C | A | | | | | | |
| GV-60 | A | A | A | A | G | U | G | G | C | A | | | | | | |
| GV-61 | A | A | A | A | G | U | G | G | C | A | | | | | | |
| GV-62 | A | A | A | A | G | U | G | G | C | A | | | | | | |
| GV-63 | — | — | — | — | — | — | — | — | — | — | | | | | | |
| GV-64 | — | — | — | — | — | — | — | — | — | — | | | | | | |
| GV-65 | — | — | — | — | — | — | — | — | — | — | | | | | | |
| GV-66 | — | — | — | — | — | — | — | — | — | — | | | | | | |
| GV-67 | A | A | A | A | G | U | G | G | C | A | | | | | | |
| GV-68 | A | A | A | A | G | U | G | G | C | A | | | | | | |
| GV-69 | A | A | A | A | G | U | G | G | C | A | | | | | | |
| GV-70 | A | A | A | A | G | U | G | G | C | A | | | | | | |
| GV-71 | A | A | A | A | G | U | G | G | C | A | | | | | | |
| GV-72 | A | A | A | A | G | U | G | G | C | A | | | | | | |
| GV-73 | A | A | A | A | G | U | G | G | C | A | | | | | | |
| GV-74 | A | A | A | A | G | U | G | G | C | A | | | | | | |
| sgRNA | | | | | | | | | | | | | | | | |
| Variant | | | | | | | | | | | | | | | | |
| | | | | | | | 91 | | | | | | | | | |
| GV-37 | C | C | G | A | G | U | C | G | G | U | | | | | | |
| GV-38 | C | C | G | A | G | U | C | G | G | U | | | | | | |
| GV-39 | C | C | G | A | G | U | C | G | G | U | | | | | | |
| GV-40 | C | C | G | A | G | U | C | G | G | U | | | | | | |
| GV-41 | C | C | G | A | G | U | C | G | G | U | | | | | | |
| GV-42 | C | C | G | A | G | U | C | G | G | U | | | | | | |
| GV-43 | C | C | G | A | G | U | C | G | G | U | | | | | | |
| GV-44 | C | C | G | A | G | U | C | G | G | U | | | | | | |
| GV-45 | C | C | G | A | G | U | C | G | G | U | | | | | | |
| GV-46 | C | C | G | A | G | U | C | G | G | U | | | | | | |
| GV-47 | C | C | G | A | G | U | C | G | G | U | | | | | | |
| GV-48 | C | C | G | A | G | U | C | G | G | U | | | | | | |
| GV-49 | C | C | G | A | G | U | C | G | G | U | | | | | | |
| GV-50 | C | C | G | A | G | U | C | G | G | U | | | | | | |
| GV-51 | C | C | G | A | G | U | C | G | G | U | | | | | | |
| GV-52 | C | C | G | A | G | U | C | G | G | U | | | | | | |
| GV-53 | C | C | G | A | G | U | C | G | G | U | | | | | | |
| GV-54 | C | C | G | A | G | U | C | G | G | U | | | | | | |
| GV-55 | C | C | G | A | G | U | C | G | G | U | | | | | | |
| GV-56 | C | C | G | A | G | U | C | G | G | U | | | | | | |
| GV-57 | C | C | G | A | G | U | C | G | G | U | | | | | | |
| GV-58 | C | C | G | A | G | U | C | G | G | U | | | | | | |
| GV-59 | C | C | G | A | G | U | C | G | G | U | | | | | | |
| GV-60 | C | C | G | A | G | U | C | G | G | U | | | | | | |
| GV-61 | C | C | G | A | G | U | C | G | G | U | | | | | | |
| GV-62 | C | C | G | A | G | U | C | G | G | U | | | | | | |
| GV-63 | — | — | — | — | — | — | — | — | — | — | | | | | | |
| GV-64 | — | — | — | — | — | — | — | — | — | — | | | | | | |
| GV-65 | — | — | — | — | — | — | — | — | — | — | | | | | | |
| GV-66 | — | — | — | — | — | — | — | — | — | — | | | | | | |
| GV-67 | C | C | G | A | G | U | C | G | G | U | | | | | | |
| GV-68 | C | C | G | A | G | U | C | G | G | U | | | | | | |
| GV-69 | C | C | G | A | G | U | C | G | G | U | | | | | | |
| GV-70 | C | C | G | A | G | U | C | G | G | U | | | | | | |
| GV-71 | C | C | G | A | G | U | C | G | G | U | | | | | | |
| GV-72 | C | C | G | A | G | U | C | G | G | U | | | | | | |
| GV-73 | C | C | G | A | G | U | C | G | G | U | | | | | | |
| GV-74 | C | C | G | A | G | U | C | G | G | U | | | | | | |
| sgRNA | | | | | | | | | | | | | | | | |
| Variant | | | | | | | | | | | | | | | | |
| | | | | | | | 101 | | | | | | | | | |
| GV-37 | G | C | U | U | U | U | U | U | U | U | | | | | | |
| GV-38 | G | C | U | U | U | U | U | U | U | U | | | | | | |
| GV-39 | G | C | U | U | U | U | U | U | U | U | | | | | | |
| GV-40 | G | C | U | U | U | U | U | U | U | U | | | | | | |
| GV-41 | G | C | U | U | U | U | U | U | U | U | | | | | | |
| GV-42 | G | C | U | U | U | U | U | U | U | U | | | | | | |
| GV-43 | G | C | U | U | U | U | U | U | U | U | | | | | | |
| GV-44 | G | C | U | U | U | U | U | U | U | U | | | | | | |
| GV-45 | G | C | U | U | U | U | U | U | U | U | | | | | | |
| GV-46 | G | C | U | U | U | U | U | U | U | U | | | | | | |
| GV-47 | G | C | U | U | U | U | U | U | U | U | | | | | | |
| GV-48 | G | C | U | U | U | U | U | U | U | U | | | | | | |
| GV-49 | G | C | U | U | U | U | U | U | U | U | | | | | | |
| GV-50 | G | C | U | U | U | U | U | U | U | U | | | | | | |
| GV-51 | G | C | U | U | U | U | U | U | U | U | | | | | | |
| GV-52 | G | C | U | U | U | U | U | U | U | U | | | | | | |
| GV-53 | G | C | U | U | U | U | U | U | U | U | | | | | | |
| GV-54 | G | C | U | U | U | U | U | U | U | U | | | | | | |
| GV-55 | G | C | U | U | U | U | U | U | U | U | | | | | | |
| GV-56 | G | C | U | U | U | U | U | U | U | U | | | | | | |
| GV-57 | G | C | U | U | U | U | U | U | U | U | | | | | | |
| GV-58 | G | C | U | U | U | U | U | U | U | U | | | | | | |
| GV-59 | G | C | U | U | U | U | U | U | U | U | | | | | | |
| GV-60 | G | C | U | U | U | U | U | U | U | U | | | | | | |
| GV-61 | G | C | U | U | U | U | U | U | U | U | | | | | | |
| GV-62 | G | C | U | U | U | U | U | U | U | U | | | | | | |
| GV-63 | — | — | — | U | U | U | U | U | U | U | | | | | | |
| GV-64 | — | — | — | U | U | U | U | U | U | U | | | | | | |
| GV-65 | — | — | — | U | U | U | U | U | U | U | | | | | | |
| GV-66 | — | — | — | U | U | U | U | U | U | U | | | | | | |
| GV-67 | G | C | U | U | U | U | U | U | U | U | | | | | | |
| GV-68 | G | C | U | U | U | U | U | U | U | U | | | | | | |
| GV-69 | G | C | U | U | U | U | U | U | U | U | | | | | | |
| GV-70 | G | C | U | U | U | U | U | U | U | U | | | | | | |
| GV-71 | G | C | U | U | U | U | U | U | U | U | | | | | | |
| GV-72 | G | C | U | U | U | U | U | U | U | U | | | | | | |
| GV-73 | G | C | U | U | U | U | U | U | U | U | | | | | | |
| GV-74 | G | C | U | U | U | U | U | U | U | U | | | | | | |
| sgRNA | | | | | | | | | | | | | | | | |
| Variant | Hairpins | | | | | | | | | | | | | | | |
| | | | | | | | 71 | | | | | | | | | |
| GV-75 | A | U | C | A | A | C | U | U | G | A | | | | | | |
| GV-76 | A | U | C | A | A | C | U | U | G | A | | | | | | |
| GV-77 | A | U | C | A | A | C | U | U | G | A | | | | | | |
| GV-78 | A | U | C | A | A | C | U | U | G | A | | | | | | |
| GV-79 | A | U | C | A | A | — | — | — | — | — | | | | | | |
| GV-80 | A | U | C | A | A | C | — | — | — | — | | | | | | |
| GV-81 | A | U | C | A | A | C | U | — | — | — | | | | | | |
| sgRNA | | | | | | | | | | | | | | | | |
| Variant | | | | | | | | | | | | | | | | |
| | | | | | | | 81 | | | | | | | | | |
| GV-75 | A | A | A | A | G | U | G | G | C | A | | | | | | |
| GV-76 | A | A | A | A | G | U | G | G | C | A | | | | | | |
| GV-77 | A | A | A | A | G | U | G | G | C | A | | | | | | |
| GV-78 | A | A | A | A | G | U | G | G | C | A | | | | | | |
| GV-79 | — | — | — | — | — | U | G | G | C | A | | | | | | |
| GV-80 | — | — | — | — | — | U | G | G | C | A | | | | | | |
| GV-81 | — | — | — | — | — | U | G | G | C | A | | | | | | |
| sgRNA | | | | | | | | | | | | | | | | |
| Variant | | | | | | | | | | | | | | | | |
| | | | | | | | 91 | | | | | | | | | |
| GV-75 | C | C | G | A | G | U | C | G | G | U | | | | | | |
| GV-76 | C | C | G | A | G | U | C | G | G | U | | | | | | |
| GV-77 | C | C | G | A | G | U | C | G | G | U | | | | | | |
| GV-78 | C | C | G | A | G | U | C | G | G | U | | | | | | |
| GV-79 | C | C | G | A | G | U | C | G | G | U | | | | | | |
| GV-80 | C | C | G | A | G | U | C | G | G | U | | | | | | |
| GV-81 | C | C | G | A | G | U | C | G | G | U | | | | | | |
| sgRNA | | | | | | | | | | | | | | | | |
| Variant | | | | | | | | | | | | | | | | |
| | | | | | | | 101 | | | | | | | | | |
| GV-75 | G | C | U | U | U | U | U | U | U | U | | | | | | |
| GV-76 | G | C | U | U | U | U | U | U | U | U | | | | | | |
| GV-77 | G | C | U | U | U | U | U | U | U | U | | | | | | |
| GV-78 | G | C | U | U | U | U | U | U | U | U | | | | | | |
| GV-79 | G | C | U | U | U | U | U | U | U | U | | | | | | |
| GV-80 | G | C | U | U | U | U | U | U | U | U | | | | | | |
| GV-81 | G | C | U | U | U | U | U | U | U | U | | | | | | |

TABLE 4
Guide Variant Template Assembly Primers

| GV | | [Primer 1]/ | | [Primer 2]/ | | [Primer 3]/ | | [Primer 4]/ | | [Primer 5]/ |
|---|---|---|---|---|---|---|---|---|---|---|
| No. | Primer 1 | nM | Primer 2 | nM | Primer 3 | nM | Primer 4 | nM | Primer 5 | nM |
| GV-1 | AGTAATAATA | 640 | TATAGTAATAATACGACT | 2 | GGGGCCACTAGGGACAGGATGAAAAAGAGCTA | 0.2 | AAAAAAAGCACCGACTC | 2 | AAAAAAAG | 640 |
| | CGACTCACT | | CACTATAGGGGGCCACTA | | GAAATAGCAAGTTTTTTTAAGGCTAGTCCGTT | | GGTGCCACTTTTTCAAG | | CACCGACT | |
| | ATAG | | GGGACAGGAT | | ATCAAC | | TTGATAACGGACTAGC | | CGGTGCC | |
| GV-2 | AGTAATAATA | 640 | TATAGTAATAATACGACT | 2 | GGGGCCACTAGGGACAGGATGATATAGAGCTA | 0.2 | AAAAAAAGCACCGACTC | 2 | AAAAAAAG | 640 |
| | CGACTCACT | | CACTATAGGGGGCCACTA | | GAAATAGCAAGTTATATTAAGGCTAGTCCGTT | | GGTGCCACTTTTTCAAG | | CACCGACT | |
| | ATAG | | GGGACAGGAT | | ATCAAC | | TTGATAACGGACTAGC | | CGGTGCC | |
| GV-3 | AGTAATAATA | 640 | TATAGTAATAATACGACT | 2 | GGGGCCACTAGGGACAGGATGTTTTAGAGGAT | 0.2 | AAAAAAAGCACCGACTC | 2 | AAAAAAAG | 640 |
| | CGACTCACT | | CACTATAGGGGGCCACTA | | GAAAATCCAAGTTAAAATAAGGCTAGTCCGTT | | GGTGCCACTTTTTCAAG | | CACCGACT | |
| | ATAG | | GGGACAGGAT | | ATCAAC | | TTGATAACGGACTAGC | | CGGTGCC | |
| GV-4 | AGTAATAATA | 640 | TATAGTAATAATACGACT | 2 | GGGGCCACTAGGGACAGGATGAAAATGAGGAT | 0.2 | AAAAAAAGCACCGACTC | 2 | AAAAAAAG | 640 |
| | CGACTCACT | | CACTATAGGGGGCCACTA | | GAAAATCCAAGTATTTTTAAGGCTAGTCCGTT | | GGTGCCACTTTTTCAAG | | CACCGACT | |
| | ATAG | | GGGACAGGAT | | ATCAAC | | TTGATAACGGACTAGC | | CGGTGCC | |
| GV-5 | AGTAATAATA | 640 | TATAGTAATAATACGACT | 2 | GGGGCCACTAGGGACAGGATGATTATGAGGAT | 0.2 | AAAAAAAGCACCGACTC | 2 | AAAAAAAG | 640 |
| | CGACTCACT | | CACTATAGGGGGCCACTA | | GAAAATCCAAGTATAATTAAGGCTAGTCCGTT | | GGTGCCACTTTTTCAAG | | CACCGACT | |
| | ATAG | | GGGACAGGAT | | ATCAAC | | TTGATAACGGACTAGC | | CGGTGCC | |
| GV-6 | AGTAATAATA | 640 | TATAGTAATAATACGACT | 2 | GGGGCCACTAGGGACAGGATGTAATTGAGGAT | 0.2 | AAAAAAAGCACCGACTC | 2 | AAAAAAAG | 640 |
| | CGACTCACT | | CACTATAGGGGGCCACTA | | GAAAATCCAAGTAATTATAAGGCTAGTCCGTT | | GGTGCCACTTTTTCAAG | | CACCGACT | |
| | ATAG | | GGGACAGGAT | | ATCAAC | | TTGATAACGGACTAGC | | CGGTGCC | |
| GV-7 | AGTAATAATA | 640 | TATAGTAATAATACGACT | 2 | GGGGCCACTAGGGACAGGATGAAAATCAAGTG | 0.2 | AAAAAAAGCACCGACTC | 2 | AAAAAAAG | 640 |
| | CGACTCACT | | CACTATAGGGGGCCACTA | | ATGAAAATCGAGATTTTTAAGGCTAGTCCGTT | | GGTGCCACTTTTTCAAG | | CACCGACT | |
| | ATAG | | GGGACAGGAT | | ATCAAC | | TTGATAACGGACTAGC | | CGGTGCC | |
| GV-8 | AGTAATAATA | 640 | TATAGTAATAATACGACT | 2 | GGGGCCACTAGGGACAGGATGAAAATGAAGGA | 0.2 | AAAAAAAGCACCGACTC | 2 | AAAAAAAG | 640 |
| | CGACTCACT | | CACTATAGGGGGCCACTA | | TGAAAATCCAGTATTTTTAAGGCTAGTCCGTT | | GGTGCCACTTTTTCAAG | | CACCGACT | |
| | ATAG | | GGGACAGGAT | | ATCAAC | | TTGATAACGGACTAGC | | CGGTGCC | |
| GV-9 | AGTAATAATA | 640 | TATAGTAATAATACGACT | 2 | GGGGCCACTAGGGACAGGATGATTTAGAGCTA | 0.2 | AAAAAAAGCACCGACTC | 2 | AAAAAAAG | 640 |
| | CGACTCACT | | CACTATAGGGGGCCACTA | | GAAATAGCAAGTTAAATTAAGGCTAGTCCGTT | | GGTGCCACTTTTTCAAG | | CACCGACT | |
| | ATAG | | GGGACAGGAT | | ATCAAC | | TTGATAACGGACTAGC | | CGGTGCC | |
| GV-10 | AGTAATAATA | 640 | TATAGTAATAATACGACT | 2 | GGGGCCACTAGGGACAGGATGTCTCAGAGCTA | 0.2 | AAAAAAAGCACCGACTC | 2 | AAAAAAAG | 640 |
| | CGACTCACT | | CACTATAGGGGGCCACTA | | GAAATAGCAAGTTGAGATAAGGCTAGTCCGTT | | GGTGCCACTTTTTCAAG | | CACCGACT | |
| | ATAG | | GGGACAGGAT | | ATCAAC | | TTGATAACGGACTAGC | | CGGTGCC | |
| GV-11 | AGTAATAATA | 640 | TATAGTAATAATACGACT | 2 | GGGGCCACTAGGGACAGGATGTCCCAGAGCTA | 0.2 | AAAAAAAGCACCGACTC | 2 | AAAAAAAG | 640 |
| | CGACTCACT | | CACTATAGGGGGCCACTA | | GAAATAGCAAGTTGGGATAAGGCTAGTCCGTT | | GGTGCCACTTTTTCAAG | | CACCGACT | |
| | ATAG | | GGGACAGGAT | | ATCAAC | | TTGATAACGGACTAGC | | CGGTGCC | |
| GV-12 | AGTAATAATA | 640 | TATAGTAATAATACGACT | 2 | GGGGCCACTAGGGACAGGATGTTTTAGACTCA | 0.2 | AAAAAAAGCACCGACTC | 2 | AAAAAAAG | 640 |
| | CGACTCACT | | CACTATAGGGGGCCACTA | | GAAATCAGAAGTTAAAATAAGGCTAGTCCGTT | | GGTGCCACTTTTTCAAG | | CACCGACT | |
| | ATAG | | GGGACAGGAT | | ATCAAC | | TTGATAACGGACTAGC | | CGGTGCC | |
| GV-13 | AGTAATAATA | 640 | TATAGTAATAATACGACT | 2 | GGGGCCACTAGGGACAGGATGTTTTAGAGCTA | 0.2 | AAAAAAAGCACCGACTC | 2 | AAAAAAAG | 640 |
| | CGACTCACT | | CACTATAGGGGGCCACTA | | GAAATAGCTCTAAAATAAGGCTAGTCCGTTAT | | GGTGCCACTTTTTCAAG | | CACCGACT | |
| | ATAG | | GGGACAGGAT | | CAAC | | TTGATAACGGACTAGC | | CGGTGCC | |
| GV-14 | AGTAATAATA | 640 | TATAGTAATAATACGACT | 2 | GGGGCCACTAGGGACAGGATGTTTTAGAGGAA | 0.2 | AAAAAAAGCACCGACTC | 2 | AAAAAAAG | 640 |
| | CGACTCACT | | CACTATAGGGGGCCACTA | | ACTCTAAAATAAGGCTAGTCCGTTATCAAC | | GGTGCCACTTTTTCAAG | | CACCGACT | |
| | ATAG | | GGGACAGGAT | | | | TTGATAACGGACTAGC | | CGGTGCC | |
| GV-15 | AGTAATAATA | 640 | TATAGTAATAATACGACT | 2 | GGGGCCACTAGGGACAGGATGTTTTAGAAATA | 0.2 | AAAAAAAGCACCGACTC | 2 | AAAAAAAG | 640 |
| | CGACTCACT | | CACTATAGGGGGCCACTA | | AAATAAGGCTAGTCCGTTATCAAC | | GGTGCCACTTTTTCAAG | | CACCGACT | |
| | ATAG | | GGGACAGGAT | | | | TTGATAACGGACTAGC | | CGGTGCC | |
| GV-16 | AGTAATAATA | 640 | TATAGTAATAATACGACT | 2 | GGGGCCACTAGGGACAGGATATTTTAGAGCTA | 0.2 | AAAAAAAGCACCGACTC | 2 | AAAAAAAG | 640 |
| | CGACTCACT | | CACTATAGGGGGCCACTA | | GAAATAGCAAGTTAAAATAAGGCTAGTCCGTT | | GGTGCCACTTTTTCAAG | | CACCGACT | |
| | ATAG | | GGGACAGGAT | | ATCAAC | | TTGATAACGGACTAGC | | CGGTGCC | |
| GV-17 | AGTAATAATA | 640 | TATAGTAATAATACGACT | 2 | GGGGCCACTAGGGACAGGATATTTTAGAGCTA | 0.2 | AAAAAAAGCACCGACTC | 2 | AAAAAAAG | 640 |
| | CGACTCACT | | CACTATAGGGGGCCACTA | | GAAATAGCAAGTTAAAACAAGGCTAGTCCGTT | | GGTGCCACTTTTTCAAG | | CACCGACT | |
| | ATAG | | GGGACAGGAT | | ATCAAC | | TTGATAACGGACTAGC | | CGGTGCC | |
| GV-18 | AGTAATAATA | 640 | TATAGTAATAATACGACT | 2 | GGGGCCACTAGGGACAGGATGACGATAGAACG | 0.2 | AAAAAAAGCACCGACTC | 2 | AAAAAAAG | 640 |
| | CGACTCACT | | CACTATAGGGGGCCACTA | | GAAACGTTGGACATCGTTAAGGCTAGTCCGTT | | GGTGCCACTTTTTCAAG | | CACCGACT | |
| | ATAG | | GGGACAGGAT | | ATCAAC | | TTGATAACGGACTAGC | | CGGTGCC | |
| GV-19 | AGTAATAATA | 640 | TATAGTAATAATACGACT | 2 | GGGGCCACTAGGGACAGGATGACGATGAGACG | 0.2 | AAAAAAAGCACCGACTC | 2 | AAAAAAAG | 640 |
| | CGACTCACT | | CACTATAGGGGGCCACTA | | GAAACGTCAAGTATCGTTAAGGCTAGTCCGTT | | GGTGCCACTTTTTCAAG | | CACCGACT | |
| | ATAG | | GGGACAGGAT | | ATCAAC | | TTGATAACGGACTAGC | | CGGTGCC | |
| GV-20 | AGTAATAATA | 640 | TATAGTAATAATACGACT | 2 | GGGGCCACTAGGGACAGGATGTTTTAAGACTA | 0.2 | AAAAAAAGCACCGACTC | 2 | AAAAAAAG | 640 |
| | CGACTCACT | | CACTATAGGGGGCCACTA | | GAAATAGTGGACTAAAATAAGGCTAGTCCGTT | | GGTGCCACTTTTTCAAG | | CACCGACT | |
| | ATAG | | GGGACAGGAT | | ATCAAC | | TTGATAACGGACTAGC | | CGGTGCC | |
| GV-21 | AGTAATAATA | 640 | TATAGTAATAATACGACT | 2 | GGGGCCACTAGGGACAGGATCGTTTAGAGCTA | 0.2 | AAAAAAAGCACCGACTC | 2 | AAAAAAAG | 640 |
| | CGACTCACT | | CACTATAGGGGGCCACTA | | GAAATAGCAAGTTAAAATAAGGCTAGTCCGTT | | GGTGCCACTTTTTCAAG | | CACCGACT | |
| | ATAG | | GGGACAGGAT | | ATCAAC | | TTGATAACGGACTAGC | | CGGTGCC | |
| GV-22 | AGTAATAATA | 640 | TATAGTAATAATACGACT | 2 | GGGGCCACTAGGGACAGGATGTGGTAGAGCTA | 0.2 | AAAAAAAGCACCGACTC | 2 | AAAAAAAG | 640 |
| | CGACTCACT | | CACTATAGGGGGCCACTA | | GAAATAGCAAGTTAAAATAAGGCTAGTCCGTT | | GGTGCCACTTTTTCAAG | | CACCGACT | |
| | ATAG | | GGGACAGGAT | | ATCAAC | | TTGATAACGGACTAGC | | CGGTGCC | |
| GV-23 | AGTAATAATA | 640 | TATAGTAATAATACGACT | 2 | GGGGCCACTAGGGACAGGATGTTTGCGAGCTA | 0.2 | AAAAAAAGCACCGACTC | 2 | AAAAAAAG | 640 |
| | CGACTCACT | | CACTATAGGGGGCCACTA | | GAAATAGCAAGTTAAAATAAGGCTAGTCCGTT | | GGTGCCACTTTTTCAAG | | CACCGACT | |
| | ATAG | | GGGACAGGAT | | ATCAAC | | TTGATAACGGACTAGC | | CGGTGCC | |
| GV-24 | AGTAATAATA | 640 | TATAGTAATAATACGACT | 2 | GGGGCCACTAGGGACAGGATGTTTTAGAGTGA | 0.2 | AAAAAAAGCACCGACTC | 2 | AAAAAAAG | 640 |
| | CGACTCACT | | CACTATAGGGGGCCACTA | | GAAATAGCAAGTTCACATAAGGCTAGTCCGTT | | GGTGCCACTTTTTCAAG | | CACCGACT | |
| | ATAG | | GGGACAGGAT | | ATCAAC | | TTGATAACGGACTAGC | | CGGTGCC | |
| GV-25 | AGTAATAATA | 640 | TATAGTAATAATACGACT | 2 | GGGGCCACTAGGGACAGGATGTTTTAGAGCTA | 0.2 | AAAAAAAGCACCGACTC | 2 | AAAAAAAG | 640 |
| | CGACTCACT | | CACTATAGGGGGCCACTA | | GAAATAGCAAGTTACACTAAGGCTAGTCCGTT | | GGTGCCACTTTTTCAAG | | CACCGACT | |
| | ATAG | | GGGACAGGAT | | ATCAAC | | TTGATAACGGACTAGC | | CGGTGCC | |
| GV-26 | AGTAATAATA | 640 | TATAGTAATAATACGACT | 2 | GGGGCCACTAGGGACAGGATGTTTTAGAGCTA | 0.2 | AAAAAAAGCACCGACTC | 2 | AAAAAAAG | 640 |
| | CGACTCACT | | CACTATAGGGGGCCACTA | | GAAATAGCAAGTTAACAGAAGGCTAGTCCGTT | | GGTGCCACTTTTTCAAG | | CACCGACT | |
| | ATAG | | GGGACAGGAT | | ATCAAC | | TTGATAACGGACTAGC | | CGGTGCC | |
| GV-27 | AGTAATAATA | 640 | TATAGTAATAATACGACT | 2 | GGGGCCACTAGGGACAGGATGTTTTAGAGCTA | 0.2 | AAAAAAAGCACCGACTC | 2 | AAAAAAAG | 640 |
| | CGACTCACT | | CACTATAGGGGGCCACTA | | GAAATAGCAAGTTAAAATAACTGGCTAGTCCG | | GGTGCCACTTTTTCAAG | | CACCGACT | |
| | ATAG | | GGGACAGGAT | | TTATCAAC | | TTGATAACGGACTAGC | | CGGTGCC | |
| GV-28 | AGTAATAATA | 640 | TATAGTAATAATACGACT | 2 | GGGGCCACTAGGGACAGGATGTTTTAGAGCTA | 0.2 | AAAAAAAGCACCGACTC | 2 | AAAAAAAG | 640 |
| | CGACTCACT | | CACTATAGGGGGCCACTA | | GAAATAGCAAGTTAAAATGCTAGTCCGTTATC | | GGTGCCACTTTTTCAAG | | CACCGACT | |
| | ATAG | | GGGACAGGAT | | AAC | | TTGATAACGGACTAGC | | CGGTGCC | |
| GV-29 | AGTAATAATA | 640 | TATAGTAATAATACGACT | 2 | GGGGCCACTAGGGACAGGATGTTTTAGAGCTA | 0.2 | AAAAAAAGCACCGACTC | 2 | AAAAAAAG | 640 |
| | CGACTCACT | | CACTATAGGGGGCCACTA | | GAAATAGCAAGTTAAAATAACTCGGCTAGTCC | | GGTGCCACTTTTTCAAG | | CACCGACT | |
| | ATAG | | GGGACAGGAT | | CGTTATCAAC | | TTGATAACGGACTAGC | | CGGTGCC | |
| GV-30 | AGTAATAATA | 640 | TATAGTAATAATACGACT | 2 | GGGGCCACTAGGGACAGGATGTTTTAGAGCTA | 0.2 | AAAAAAAGCACCGACTC | 2 | AAAAAAAG | 640 |
| | CGACTCACT | | CACTATAGGGGGCCACTA | | GAAATAGCAAGTTAAAATAACTCTGGCTAGTC | | GGTGCCACTTTTTCAAG | | CACCGACT | |
| | ATAG | | GGGACAGGAT | | CGTTATCAAC | | TTGATAACGGACTAGC | | CGGTGCC | |
| GV-31 | AGTAATAATA | 640 | TATAGTAATAATACGACT | 2 | GGGGCCACTAGGGACAGGATGTTTTAGAGCTA | 0.2 | AAAAAAAGCACCGACTC | 2 | AAAAAAAG | 640 |
| | CGACTCACT | | CACTATAGGGGGCCACTA | | GAAATAGCAAGTTAAAATAACTCTCTGGCTAG | | GGTGCCACTTTTTCAAG | | CACCGACT | |
| | ATAG | | GGGACAGGAT | | TCCGTTATCAAC | | TTGATAACGGACTAGC | | CGGTGCC | |
| GV-32 | AGTAATAATA | 640 | TATAGTAATAATACGACT | 2 | GGGGCCACTAGGGACAGGATGTTTTAGAGCTA | 0.2 | AAAAAAAGCACCGACTC | 2 | AAAAAAAG | 640 |
| | CGACTCACT | | CACTATAGGGGGCCACTA | | GAAATAGCAAGTTAAAATAAGGCTAGTCCGTT | | GGTGCCACTTTTTCAAG | | CACCGACT | |
| | ATAG | | GGGACAGGAT | | ATCAAC | | TTGATAACGGACTAGC | | CGGTGCC | |
| GV-33 | AGTAATAATA | 640 | TATAGTAATAATACGACT | 2 | GGGGCCACTAGGGACAGGATGTTTTAGAGGAA | 0.2 | AAAAAAAGCACCGACTC | 2 | AAAAAAAG | 640 |
| | CGACTCACT | | CACTATAGGGGGCCACTA | | ACAAGTTAAAATAAGGCTAGTCCGTTATCAAC | | GGTGCCACTTTTTCAAG | | CACCGACT | |
| | ATAG | | GGGACAGGAT | | | | TTGATAACGGACTAGC | | CGGTGCC | |
| GV-34 | AGTAATAATA | 640 | TATAGTAATAATACGACT | 2 | GGGGCCACTAGGGACAGGATGTTTTAGAGACA | 0.2 | AAAAAAAGCACCGACTC | 2 | AAAAAAAG | 640 |
| | CGACTCACT | | CACTATAGGGGGCCACTA | | AGTTAAAATAAGGCTAGTCCGTTATCAAC | | GGTGCCACTTTTTCAAG | | CACCGACT | |
| | ATAG | | GGGACAGGAT | | | | TTGATAACGGACTAGC | | CGGTGCC | |
| GV-35 | AGTAATAATA | 640 | TATAGTAATAATACGACT | 2 | GGGGCCACTAGGGACAGGATGTTTTAGGAGAA | 0.2 | AAAAAAAGCACCGACTC | 2 | AAAAAAAG | 640 |
| | CGACTCACT | | CACTATAGGGGGCCACTA | | ACTTTAAAATAAGGCTAGTCCGTTATCAAC | | GGTGCCACTTTTTCAAG | | CACCGACT | |
| | ATAG | | GGGACAGGAT | | | | TTGATAACGGACTAGC | | CGGTGCC | |
| GV-36 | AGTAATAATA | 640 | TATAGTAATAATACGACT | 2 | GGGGCCACTAGGGACAGGATGTTTTATCGAAA | 0.2 | AAAAAAAGCACCGACTC | 2 | AAAAAAAG | 640 |
| | CGACTCACT | | CACTATAGGGGGCCACTA | | TCTAAAATAAGGCTAGTCCGTTATCAAC | | GGTGCCACTTTTTCAAG | | CACCGACT | |
| | ATAG | | GGGACAGGAT | | | | TTGATAACGGACTAGC | | CGGTGCC | |
| GV-37 | AGTAATAATA | 640 | TATAGTAATAATACGACT | 2 | GGGGCCACTAGGGACAGGATGTTTTACTTCGG | 0.2 | AAAAAAAGCACCGACTC | 2 | AAAAAAAG | 640 |
| | CGACTCACT | | CACTATAGGGGGCCACTA | | TAAAATAAGGCTAGTCCGTTATCAAC | | GGTGCCACTTTTTCAAG | | CACCGACT | |
| | ATAG | | GGGACAGGAT | | | | TTGATAACGGACTAGC | | CGGTGCC | |
| GV-38 | AGTAATAATA | 640 | TATAGTAATAATACGACT | 2 | GGGGCCACTAGGGACAGGATGTTTTAGATACT | 0.2 | AAAAAAAGCACCGACTC | 2 | AAAAAAAG | 640 |
| | CGACTCACT | | CACTATAGGGGGCCACTA | | TAAAATAAGGCTAGTCCGTTATCAAC | | GGTGCCACTTTTTCAAG | | CACCGACT | |
| | ATAG | | GGGACAGGAT | | | | TTGATAACGGACTAGC | | CGGTGCC | |
| GV-39 | AGTAATAATA | 640 | TATAGTAATAATACGACT | 2 | GGGGCCACTAGGGACAGGATGTTTTATGAAAC | 0.2 | AAAAAAAGCACCGACTC | 2 | AAAAAAAG | 640 |
| | CGACTCACT | | CACTATAGGGGGCCACTA | | TAAAATAAGGCTAGTCCGTTATCAAC | | GGTGCCACTTTTTCAAG | | CACCGACT | |
| | ATAG | | GGGACAGGAT | | | | TTGATAACGGACTAGC | | CGGTGCC | |
| GV-40 | AGTAATAATA | 640 | TATAGTAATAATACGACT | 2 | GGGGCCACTAGGGACAGGATGTTTCTTCGGAA | 0.2 | AAAAAAAGCACCGACTC | 2 | AAAAAAAG | 640 |
| | CGACTCACT | | CACTATAGGGGGCCACTA | | ATAAGGCTAGTCCGTTATCAAC | | GGTGCCACTTTTTCAAG | | CACCGACT | |
| | ATAG | | GGGACAGGAT | | | | TTGATAACGGACTAGC | | CGGTGCC | |
| GV-41 | AGTAATAATA | 640 | TATAGTAATAATACGACT | 2 | GGGGCCACTAGGGACAGGATGTTTTAGGCTAG | 0.2 | AAAAAAAGCACCGACTC | 2 | AAAAAAAG | 640 |
| | CGACTCACT | | CACTATAGGGGGCCACTA | | AAATAGCAAGTTAAAATAAGGCTAGTCCGTTA | | GGTGCCACTTTTTCAAG | | CACCGACT | |
| | ATAG | | GGGACAGGAT | | TCAAC | | TTGATAACGGACTAGC | | CGGTGCC | |
| GV-42 | AGTAATAATA | 640 | TATAGTAATAATACGACT | 2 | GGGGCCACTAGGGACAGGATGTTTTAGCTAGA | 0.2 | AAAAAAAGCACCGACTC | 2 | AAAAAAAG | 640 |
| | CGACTCACT | | CACTATAGGGGGCCACTA | | AATAGCAAGTTAAAATAAGGCTAGTCCGTTAT | | GGTGCCACTTTTTCAAG | | CACCGACT | |
| | ATAG | | GGGACAGGAT | | CAAC | | TTGATAACGGACTAGC | | CGGTGCC | |
| GV-43 | AGTAATAATA | 640 | TATAGTAATAATACGACT | 2 | GGGGCCACTAGGGACAGGATGTTTTACTAGAA | 0.2 | AAAAAAAGCACCGACTC | 2 | AAAAAAAG | 640 |
| | CGACTCACT | | CACTATAGGGGGCCACTA | | ATAGCAAGTTAAAATAAGGCTAGTCCGTTATC | | GGTGCCACTTTTTCAAG | | CACCGACT | |
| | ATAG | | GGGACAGGAT | | AAC | | TTGATAACGGACTAGC | | CGGTGCC | |
| GV-44 | AGTAATAATA | 640 | TATAGTAATAATACGACT | 2 | GGGGCCACTAGGGACAGGATGTTTTAGAGCTA | 0.2 | AAAAAAAGCACCGACTC | 2 | AAAAAAAG | 640 |
| | CGACTCACT | | CACTATAGGGGGCCACTA | | GAAATAGCAGTTAAAATAAGGCTAGTCCGTTA | | GGTGCCACTTTTTCAAG | | CACCGACT | |
| | ATAG | | GGGACAGGAT | | TCAAC | | TTGATAACGGACTAGC | | CGGTGCC | |
| GV-45 | AGTAATAATA | 640 | TATAGTAATAATACGACT | 2 | GGGGCCACTAGGGACAGGATGTTTTAGAGCTA | 0.2 | AAAAAAAGCACCGACTC | 2 | AAAAAAAG | 640 |
| | CGACTCACT | | CACTATAGGGGGCCACTA | | GAAATAGAGTTAAAATAAGGCTAGTCCGTTAT | | GGTGCCACTTTTTCAAG | | CACCGACT | |
| | ATAG | | GGGACAGGAT | | CAAC | | TTGATAACGGACTAGC | | CGGTGCC | |
| GV-46 | AGTAATAATA | 640 | TATAGTAATAATACGACT | 2 | GGGGCCACTAGGGACAGGATGTTTTAGAGCTA | 0.2 | AAAAAAAGCACCGACTC | 2 | AAAAAAAG | 640 |
| | CGACTCACT | | CACTATAGGGGGCCACTA | | GAAATAAGTTAAAATAAGGCTAGTCCGTTATC | | GGTGCCACTTTTTCAAG | | CACCGACT | |
| | ATAG | | GGGACAGGAT | | AAC | | TTGATAACGGACTAGC | | CGGTGCC | |
| GV-47 | AGTAATAATA | 640 | TATAGTAATAATACGACT | 2 | GGGGCCACTAGGGACAGGATGTTTTAGAGCTA | 0.2 | AAAAAAAGCACCGACTC | 2 | AAAAAAAG | 640 |
| | CGACTCACT | | CACTATAGGGGGCCACTA | | GAAATAGTTAAAATAAGGCTAGTCCGTTATCA | | GGTGCCACTTTTTCAAG | | CACCGACT | |
| | ATAG | | GGGACAGGAT | | AC | | TTGATAACGGACTAGC | | CGGTGCC | |
| GV-48 | AGTAATAATA | 640 | TATAGTAATAATACGACT | 2 | GGGGCCACTAGGGACAGGATGTTTTAGAGCTA | 0.2 | AAAAAAAGCACCGACTC | 2 | AAAAAAAG | 640 |
| | CGACTCACT | | CACTATAGGGGGCCACTA | | GAAATAGCAAGTTAAAATAAGGCTAGTCCGTT | | GGTGCCACTTTTTCAAG | | CACCGACT | |
| | ATAG | | GGGACAGGAT | | ATCAAC | | TTGATAACGGACTAGC | | CGGTGCC | |
| GV-49 | AGTAATAATA | 640 | AGTAATAATACGACTCAC | 2 | AAAAAAAGCACCGACTCGGTGCCACTTTTTCA | 2 | N/A | | AAAAAAAG | 640 |
| | CGACTCACT | | TATAGGGGGCCACTAGGG | | AGTTGATAACGGACTAGTTCCATTTTAACTTG | | | | CACCGACT | |
| | ATAG | | ACAGGATGTTTTAGAGCT | | CTATTTCTAGCTCTA | | | | CGGTGCC | |
| | | | AGAAATAGCAAGTTAA | | | | | | | |
| GV-50 | AGTAATAATA | 640 | AGTAATAATACGACTCAC | 2 | AAAAAAAGCACCGACTCGGTGCCACTTTTTCA | 2 | N/A | | AAAAAAAG | 640 |
| | CGACTCACT | | TATAGGGGGCCACTAGGG | | AGTTGATAACGGACTAGCGAAATTTTAACTTG | | | | CACCGACT | |
| | ATAG | | ACAGGATGTTTTAGAGCT | | CTATTTCTAGCTCTA | | | | CGGTGCC | |
| | | | AGAAATAGCAAGTTAA | | | | | | | |
| GV-51 | AGTAATAATA | 640 | AGTAATAATACGACTCAC | 2 | AAAAAAAGCACCGACTCGGTGCCACTTTTTCA | 2 | N/A | | AAAAAAAG | 640 |
| | CGACTCACT | | TATAGGGGGCCACTAGGG | | AGTTGATAACGGACTTCGCTTATTTTAACTTG | | | | CACCGACT | |
| | ATAG | | ACAGGATGTTTTAGAGCT | | CTATTTCTAGCTCTA | | | | CGGTGCC | |
| | | | AGAAATAGCAAGTTAA | | | | | | | |
| GV-52 | AGTAATAATA | 640 | AGTAATAATACGACTCAC | 2 | AAAAAAAGCACCGACTCGGTGCCACTTTTTCA | 2 | N/A | | AAAAAAAG | 640 |
| | CGACTCACT | | TATAGGGGGCCACTAGGG | | AGTTGATAACGGTGAAGCCTTATTTTAACTTG | | | | CACCGACT | |
| | ATAG | | ACAGGATGTTTTAGAGCT | | CTATTTCTAGCTCTA | | | | CGGTGCC | |
| | | | AGAAATAGCAAGTTAA | | | | | | | |
| GV-53 | AGTAATAATA | 640 | AGTAATAATACGACTCAC | 2 | AAAAAAAGCACCGACTCGGTGCCACTTTTTCA | 2 | N/A | | AAAAAAAC | 640 |
| | CGACTCACT | | TATAGGGGGCCACTAGGG | | AGTTGATAAGCCACTAGCCTTATTTTAACTTG | | | | CACCCACT | |
| | ATAG | | ACAGGATGTTTTAGAGCT | | CTATTTCTAGCTCTA | | | | CGGTGCC | |
| | | | AGAAATAGCAAGTTAA | | | | | | | |
| GV-54 | AGTAATAATA | 640 | AGTAATAATACGACTCAC | 2 | AAAAAAAGCACCGACTCGGTGCCACTTTTTCA | 2 | N/A | | AAAAAAAG | 640 |
| | CGACTCACT | | TATAGGGGGCCACTAGGG | | AGTTGAATTCGGACTAGCCTTATTTTAACTTG | | | | CACCGACT | |
| | ATAG | | ACAGGATGTTTTAGAGCT | | CTATTTCTAGCTCTA | | | | CGGTGCC | |
| | | | AGAAATAGCAAGTTAA | | | | | | | |
| GV-55 | AGTAATAATA | 640 | AGTAATAATACGACTCAC | 2 | AAAAAAAGCACCGACTCGGTGCCACTTTTTCA | 2 | N/A | | AAAAAAAG | 640 |
| | CGACTCACT | | TATAGGGGGCCACTAGGG | | AGTACTTAACGGACTAGCCTTATTTTAACTTG | | | | CACCGACT | |
| | ATAG | | ACAGGATGTTTTAGAGCT | | CTATTTCTAGCTCTA | | | | CGGTGCC | |
| | | | AGAAATAGCAAGTTAA | | | | | | | |
| GV-56 | AGTAATAATA | 640 | AGTAATAATACGACTCAC | 2 | AAAAAAAGCACCGACTCGGTGCCACTTTTTCA | 2 | N/A | | AAAAAAAG | 640 |
| | CGACTCACT | | TATAGGGGGCCACTAGGG | | TCATGATAACGGACTAGCCTTATTTTAACTTG | | | | CACCGACT | |
| | ATAG | | ACAGGATGTTTTAGAGCT | | CTATTTCTAGCTCTA | | | | CGGTGCC | |
| | | | AGAAATAGCAAGTTAA | | | | | | | |
| GV-57 | AGTAATAATA | 640 | AGTAATAATACGACTCAC | 2 | AAAAAAAGCACCGACTCGGTGCCACTTTTTCA | 2 | N/A | | AAAAAAAG | 640 |
| | CGACTCACT | | TATAGGGGGCCACTAGGG | | AGTTGATAACGGACTAGGGTTATTTTAACTTG | | | | CACCGACT | |
| | ATAG | | ACAGGATGTTTTAGAGCT | | CTATTTCTAGCTCTA | | | | CGGTGCC | |
| | | | AGAAATAGCAAGTTAA | | | | | | | |
| GV-58 | AGTAATAATA | 640 | AGTAATAATACGACTCAC | 2 | AAAAAAAGCACCGACTCGGTGCCACTTTTTCA | 2 | N/A | | AAAAAAAG | 640 |
| | CGACTCACT | | TATAGGGGGCCACTAGGG | | AGTTGATAACCCACTAGGGTTATTTTAACTTG | | | | CACCGACT | |
| | ATAG | | ACAGGATGTTTTAGAGCT | | CTATTTCTAGCTCTA | | | | CGGTGCC | |
| | | | AGAAATAGCAAGTTAA | | | | | | | |
| GV-59 | AGTAATAATA | 640 | AGTAATAATACGACTCAC | 2 | AAAAAAAGCACCGACTCGGTGCCACTTTTTCA | 2 | N/A | | AAAAAAAG | 640 |
| | CGACTCACT | | TATAGGGGGCCACTAGGG | | AGTTGATAACCCACTAGCCTTATTTTAACTTG | | | | CACCGACT | |
| | ATAG | | ACAGGATGTTTTAGAGCT | | CTATTTCTAGCTCTA | | | | CGGTGCC | |
| | | | AGAAATAGCAAGTTAA | | | | | | | |
| GV-60 | AGTAATAATA | 640 | AGTAATAATACGACTCAC | 2 | AAAAAAAGCACCGACTCGGTGCCACTTTTTCA | 2 | N/A | | AAAAAAAG | 640 |
| | CGACTCACT | | TATAGGGGGCCACTAGGG | | AGTTGATAACTTACTAGCCTTATTTTAACTTG | | | | CACCGACT | |
| | ATAG | | ACAGGATGTTTTAGAGCT | | CTATTTCTAGCTCTA | | | | CGGTGCC | |
| | | | AGAAATAGCAAGTTAA | | | | | | | |
| GV-61 | AGTAATAATA | 640 | AGTAATAATACGACTCAC | 2 | AAAAAAAGCACCGACTCGGTGCCACTTTTTCA | 2 | N/A | | AAAAAAAG | 640 |
| | CGACTCACT | | TATAGGGGGCCACTAGGG | | AGTTGATAACAAACTAGCCTTATTTTAACTTG | | | | CACCGACT | |
| | ATAG | | ACAGGATGTTTTAGAGCT | | CTATTTCTAGCTCTA | | | | CGGTGCC | |
| | | | AGAAATAGCAAGTTAA | | | | | | | |
| GV-62 | AGTAATAATA | 640 | AGTAATAATACGACTCAC | 2 | AAAAAAAGCACCGACTCGGTGCCACTTTTTCA | 2 | N/A | | AAAAAAAG | 640 |
| | CGACTCACT | | TATAGGGGGCCACTAGGG | | AGTTGATAACGAACTAGTCTTATTTTAACTTG | | | | CACCGACT | |
| | ATAG | | ACAGGATGTTTTAGAGCT | | CTATTTCTAGCTCTA | | | | CGGTGCC | |
| | | | AGAAATAGCAAGTTAA | | | | | | | |
| GV-63 | AGTAATAATA | 640 | AGTAATAATACGACTCAC | 2 | AAAAAACCTTATTTTAACTTGCTATTTCTAGC | 2 | N/A | | AAAAAAAG | 640 |
| | CGACTCACT | | TATAGGGGGCCACTAGGG | | TCTA | | | | CACCGACT | |
| | ATAG | | ACAGGATGTTTTAGAGCT | | | | | | CGGTGCC | |
| | | | AGAAATAGCAAGTTAA | | | | | | | |
| GV-64 | AGTAATAATA | 640 | AGTAATAATACGACTCAC | 2 | AAAAAACTAGCCTTATTTTAACTTGCTATTTC | 2 | N/A | | AAAAAAAG | 640 |
| | CGACTCACT | | TATAGGGGGCCACTAGGG | | TAGCTCTA | | | | CACCGACT | |
| | ATAG | | ACAGGATGTTTTAGAGCT | | | | | | CGGTGCC | |
| | | | AGAAATAGCAAGTTAA | | | | | | | |
| GV-65 | AGTAATAATA | 640 | AGTAATAATACGACTCAC | 2 | AAAAAACGGACTAGCCTTATTTTAACTTGCTA | 2 | N/A | | AAAAAAAG | 640 |
| | CGACTCACT | | TATAGGGGGCCACTAGGG | | TTTCTAGCTCTA | | | | CACCGACT | |
| | ATAG | | ACAGGATGTTTTAGAGCT | | | | | | CGGTGCC | |
| | | | AGAAATAGCAAGTTAA | | | | | | | |
| GV-66 | AGTAATAATA | 640 | AGTAATAATACGACTCAC | 2 | AAAAAAATAACGGACTAGCCTTATTTTAACTT | 2 | N/A | | AAAAAAAG | 640 |
| | CGACTCACT | | TATAGGGGGCCACTAGGG | | GCTATTTCTAGCTCTA | | | | CACCGACT | |
| | ATAG | | ACAGGATGTTTTAGAGCT | | | | | | CGGTGCC | |
| | | | AGAAATACCAACTTAA | | | | | | | |
| GV-67 | AGTAATAATA | 640 | AGTAATAATACGACTCAC | 2 | AAAAAAAGCACCGACTCGGTGCCACTTTTTCA | 640 | N/A | | N/A | |
| | CGACTCACT | | TATAGGGGGCCACTAGGG | | AGTTGATAACGGGACTAGCCCTTATTTTAACT | | | | | |
| | ATAG | | ACAGGATGTTTTAGAGCT | | TGCTATTTCTAGCTCTA | | | | | |
| | | | AGAAATAGCAAGTTAA | | | | | | | |
| GV-68 | AGTAATAATA | 640 | AGTAATAATACGACTCAC | 2 | AAAAAAAGCACCGACTCGGTGCCACTTTTTCA | 640 | N/A | | N/A | |
| | CGACTCACT | | TATAGGGGGCCACTAGGG | | AGTTGATAACGGGGACTAGCCCCTTATTTTAA | | | | | |
| | ATAG | | ACAGGATGTTTTAGAGCT | | CTTGCTATTTCTAGCTCTA | | | | | |
| | | | AGAAATAGCAAGTTAA | | | | | | | |
| GV-69 | AGTAATAATA | 640 | AGTAATAATACGACTCAC | 2 | AAAAAAAGCACCGACTCGGTGCCACTTTTTCA | 640 | N/A | | N/A | |
| | CGACTCACT | | TATAGGGGGCCACTAGGG | | AGTTGATAACGGGGGACTAGCCCCCTTATTTT | | | | | |
| | ATAG | | ACAGGATGTTTTAGAGCT | | AACTTGCTATTTCTAGCTCTA | | | | | |
| | | | AGAAATAGCAAGTTAA | | | | | | | |
| GV-70 | AGTAATAATA | 640 | AGTAATAATACGACTCAC | 2 | AAAAAAAGCACCGACTCGGTGCCACTTTTTCA | 640 | N/A | | N/A | |
| | CGACTCACT | | TATAGGGGGCCACTAGGG | | AGTTGATAACAAACTAGTTTTATTTTAACTTG | | | | | |
| | ATAG | | ACAGGATGTTTTAGAGCT | | CTATTTCTAGCTCTA | | | | | |
| | | | AGAAATAGCAAGTTAA | | | | | | | |
| GV-71 | AGTAATAATA | 640 | AGTAATAATACGACTCAC | 2 | AAAAAAAGCACCGACTCGGTGCCACTTTTTCA | 640 | N/A | | N/A | |
| | CGACTCACT | | TATAGGGGGCCACTAGGG | | AGTTGATAACGGAACTAGTCCTTATTTTAACT | | | | | |
| | ATAG | | ACAGGATGTTTTAGAGCT | | TGCTATTTCTAGCTCTA | | | | | |
| | | | AGAAATAGCAAGTTAA | | | | | | | |
| GV-72 | AGTAATAATA | 640 | AGTAATAATACGACTCAC | 2 | AAAAAAAGCACCGACTCGGTGCCACTTTTTCA | 640 | N/A | | N/A | |
| | CGACTCACT | | TATAGGGGGCCACTAGGG | | AGTTGATAACGGACTAGCCTTATTTTAACTTG | | | | | |
| | ATAG | | ACAGGATGTTTTAGAGCT | | CTATTTCTAGCTCTA | | | | | |
| | | | AGAAATAGCAAGTTAA | | | | | | | |
| GV-73 | AGTAATAATA | 640 | AGTAATAATACGACTCAC | 2 | AAAAAAAGCACCGACTCGGTGCCACTTTTTCA | 640 | N/A | | N/A | |
| | CGACTCACT | | TATAGGGGGCCACTAGGG | | AGTTGATAACAGGACTAGCCTTATTTTAACTT | | | | | |
| | ATAG | | ACAGGATGTTTTAGAGCT | | GCTATTTCTAGCTCTA | | | | | |
| | | | AGAAATAGCAAGTTAA | | | | | | | |
| GV-74 | AGTAATAATA | 640 | AGTAATAATACGACTCAC | 2 | AAAAAAAGCACCGACTCGGTGCCACTTTTTCA | 640 | N/A | | N/A | |
| | CGACTCACT | | TATAGGGGGCCACTAGGG | | AGTTGATAACAGACTAGCTTTATTTTAACTTG | | | | | |
| | ATAG | | ACAGGATGTTTTAGAGCT | | CTATTTCTAGCTCTA | | | | | |
| | | | AGAAATAGCAAGTTAA | | | | | | | |
| GV-75 | AGTAATAATA | 640 | AGTAATAATACGACTCAC | 2 | AAAAAAAGCACCGACTCGGTGCCACTTTTTCA | 640 | N/A | | N/A | |
| | CGACTCACT | | TATAGGGGGCCACTAGGG | | AGTTGATAACGGGACTAGACCTTATTTTAACT | | | | | |
| | ATAG | | ACAGGATGTTTTAGAGCT | | TGCTATTTCTAGCTCTA | | | | | |
| | | | AGAAATAGCAAGTTAA | | | | | | | |
| GV-76 | AGTAATAATA | 640 | AGTAATAATACGACTCAC | 2 | AAAAAAAGCACCGACTCGGTGCCACTTTTTCA | 640 | N/A | | N/A | |
| | CGACTCACT | | TATAGGGGGCCACTAGGG | | AGTTGATAACGGCGACTAGTACCTTATTTTAA | | | | | |
| | ATAG | | ACAGGATGTTTTAGAGCT | | CTTGCTATTTCTAGCTCTA | | | | | |
| | | | AGAAATAGCAAGTTAA | | | | | | | |
| GV-77 | AGTAATAATA | 640 | AGTAATAATACGACTCAC | 2 | AAAAAAAGCACCGACTCGGTGCCACTTTTTCA | 640 | N/A | | N/A | |
| | CGACTCACT | | TATAGGGGGCCACTAGGG | | AGTTGATAACGGCGCACTAGATACCTTATTTT | | | | | |
| | ATAG | | CCACGGATGTTTTAGACT | | AACTTGCTATTTCTAGCTCTA | | | | | |
| | | | AGAAATAGCAAGTTAA | | | | | | | |
| GV-78 | AGTAATAATA | 640 | AGTAATAATACGACTCAC | 2 | AAAAAAAGCACCGACTCGGTGCCACTTTTTCA | 640 | N/A | | N/A | |
| | CGACTCACT | | TATAGGGGGCCACTAGGG | | AGTTGATAACGGACTAGCCTTATTTTAACTTG | | | | | |
| | ATAG | | ACAGGATGTTTTAGAGCT | | CTATTTCTAGCTCTA | | | | | |
| | | | AGAAATAGCAAGTTAA | | | | | | | |
| GV-79 | AGTAATAATA | 640 | AGTAATAATACGACTCAC | 2 | GTTTTAGAGCTAGAAATAGCAAGTTAAAATAA | 2 | N/A | AAAAAAAGCA | 640 | |
| | CGACTCACT | | TATAGGGGGCCACTAGGG | | GGCTAGTCCGTTATCAATGGCACCGAGTCGGT | | | CCGACTCGGT | | |
| | ATAG | | ACAGGATGTTTTAGAGCT | | GCT | | | GCC | | |
| | | | AGAAATAGCAAGTTAA | | | | | | | |
| GV-80 | AGTAATAATA | 640 | AGTAATAATACGACTCAC | 2 | GTTTTAGAGCTAGAAATAGCAAGTTAAAATAA | 2 | N/A | AAAAAAAGCA | 640 | |
| | CGACTCACT | | TATAGGGGGCCACTAGGG | | GGCTAGTCCGTTATCAACTGGCACCGAGTCGG | | | CCGACTCGGT | | |
| | ATAG | | ACAGGATGTTTTAGAGCT | | TGCT | | | GCC | | |
| | | | AGAAATAGCAAGTTAA | | | | | | | |
| GV-81 | AGTAATAATA | 640 | AGTAATAATACGACTCAC | 2 | GTTTTAGAGCTAGAAATAGCAAGTTAAAATAA | 2 | N/A | AAAAAAAGCA | 640 | |
| | CGACTCACT | | TATAGGGGGCCACTAGGG | | GGCTAGTCCGTTATCAACTTGGCACCGAGTCG | | | CCGACTCGGT | | |
| | ATAG | | ACAGGATGTTTTAGAGCT | | GTGCT | | | GCC | | |
| | | | AGAAATAGCAAGTTAA | | | | | | | |

TABLE 5

| NAME | SEQ |
|---|---|
| Delete | AGTAATAATACGACTCACTATAGGGGGCCACTAGGGACAGGATGTTTTAGAGCTAG |
| Hairpin1 | AAATAGCAAGTTAAAATAAGGCTAGTCCGTTATCAATGGCACCGAGTCGGTGCTTT |
| −0 | TTTT |
| Delete | AGTAATAATACGACTCACTATAGGGGGCCACTAGGGACAGGATGTTTTAGAGCTAG |
| Hairpin1 | AAATAGCAAGTTAAAATAAGGCTAGTCCGTTATCAACTGGCACCGAGTCGGTGCTT |
| +1 | TTTTT |
| Delete | AGTAATAATACGACTCACTATAGGGGGCCACTAGGGACAGGATGTTTTAGAGCTAG |
| Hairpin1 | AAATAGCAAGTTAAAATAAGGCTAGTCCGTTATCAACTTGGCACCGAGTCGGTGCT |
| +2 | TTTTTT |
| Delete | AGTAATAATACGACTCACTATAGGGGGCCACTAGGGACAGGATGTTTTAGAGCTAG |
| Hairpin2 | AAATAGCAAGTTAAAATAAGGCTAGTCCGTTATCAACTTGAAAAAGTGGTCCTTTT |
| −0 | TTTTTTTTT |
| Delete | AGTAATAATACGACTCACTATAGGGGGCCACTAGGGACAGGATGTTTTAGAGCTAG |
| Hairpin2 | AAATAGCAAGTTAAAATAAGGCTAGTCCGTTATCAACTTGAAAAAGTGGTCTTTTT |
| +1 | TTTTTTTT |
| Delete | AGTAATAATACGACTCACTATAGGGGGCCACTAGGGACAGGATGTTTTAGAGCTAG |
| Hairpin2 | AAATAGCAAGTTAAAATAAGGCTAGTCCGTTATCAACTTGAAAAAGTGGCTTTTTT |
| +2 | TTTTTTT |
| Decrease | AGTAATAATACGACTCACTATAGGGGGCCACTAGGGACAGGATGTTTTAGAGCTAG |
| N-H1 | AAATAGCAAGTTAAAATAAGGCTAGTCCGTCAACTTGAAAAAGTGGCACCGAGTCG |
| Spacer −3 | GTGCTTTTTTT |
| Decrease | AGTAATAATACGACTCACTATAGGGGGCCACTAGGGACAGGATGTTTTAGAGCTAG |
| N-H1 | AAATAGCAAGTTAAAATAAGGCTAGTCCGTACAACTTGAAAAAGTGGCACCGAGTC |
| Spacer −2 | GGTGCTTTTTTT |
| Decrease | AGTAATAATACGACTCACTATAGGGGGCCACTAGGGACAGGATGTTTTAGAGCTAG |
| N-H1 | AAATAGCAAGTTAAAATAAGGCTAGTCCGTATCAACTTGAAAAAGTGGCACCGAGT |
| Spacer −1 | CGGTGCTTTTTTT |
| Increase | AGTAATAATACGACTCACTATAGGGGGCCACTAGGGACAGGATGTTTTAGAGCTAG |
| N-H1 | AAATAGCAAGTTAAAATAAGGCTAGTCCGTTATCGAACTTGAAAAAGTGGCACCGA |
| Spacer +1 | GTCGGTGCTTTTTTT |
| Increase | AGTAATAATACGACTCACTATAGGGGGCCACTAGGGACAGGATGTTTTAGAGCTAG |
| N-H1 | AAATAGCAAGTTAAAATAAGGCTAGTCCGTTATCGCAACTTGAAAAAGTGGCACCG |
| Spacer +2 | AGTCGGTGCTTTTTTT |
| Increase | AGTAATAATACGACTCACTATAGGGGGCCACTAGGGACAGGATGTTTTAGAGCTAG |
| N-H1 | AAATAGCAAGTTAAAATAAGGCTAGTCCGTTATCTGCAACTTGAAAAAGTGGCACC |
| Spacer +3 | GAGTCGGTGCTTTTTTT |
| Nexus | AGTAATAATACGACTCACTATAGGGGGCCACTAGGGACAGGATGTTTTAGAGCTAG |
| Loop | AAATAGCAAGTTAAAATAAGGCTAGCAGTCCGTTATCAACTTGAAAAAGTGGCACC |
| | GAGTCGGTGCTTTTTTT |
| Nexus | AGTAATAATACGACTCACTATAGGGGGCCACTAGGGACAGGATGTTTTAGAGCTAG |
| Loop | AAATAGCAAGTTAAAATAAGGCTATGACTAGTCCGTTATCAACTTGAAAAAGTGGC |
| | ACCGAGTCGGTGCTTTTTTT |
| Nexus | AGTAATAATACGACTCACTATAGGGGGCCACTAGGGACAGGATGTTTTAGAGCTAG |
| Loop | AAATAGCAAGTTAAAATAAGGCTACTGAAACAGGTCCGTTATCAACTTGAAAAAGT |
| | GGCACCGAGTCGGTGCTTTTTTT |
| Nexus | AGTAATAATACGACTCACTATAGGGGGCCACTAGGGACAGGATGTTTTAGAGCTAG |
| Loop | AAATAGCAAGTTAAAATAAGGCTAGGATTTCAATCCAAGTCCGTTATCAACTTGAA |
| | AAAGTGGCACCGAGTCGGTGCTTTTTTT |
| AAVS | AGTAATAATACGACTCACTATAGGGGGCCACTAGGGACAGGATGTCTCAGAGCTAG |
| wt_T7 | AAATAGCAAGTTGAGATAAGGCTAGTCCGTTATCAACTTGAAAAAGTGGCACCGAG |
| | TCGGTGCTTTTTTT |
| AAVS | AGTAATAATACGACTCACTATAGGGGGCCACTAGGGACAGGATGTCTCAGAGCTAG |
| GNR | AAATAGCAAGTTGAGATAAGGCTAGTCCGTTATCAACTTGCATAAGTGGCACCGAG |
| loop_T7 | TCGGTGCTTTTTTT |
| AAVS | AGTAATAATACGACTCACTATAGGGGGCCACTAGGGACAGGATGTCTCAGAGCTAG |
| Csy4 | AAATAGCAAGTTGAGATAAGGCTAGTCCGTTATCAACTTGTATAAAGTGGCACCGA |
| loop_T7 | GTCGGTGCTTTTTTT |
| AAVS | AGTAATAATACGACTCACTATAGGGAGAGTTCACTGCCGTATAGGCAGGGGGCCAC |
| Csy4 | TAGGGACAGGATGTCTCAGAGCTAGAAATAGCAAGTTGAGATAAGGCTAGTCCGTT |
| GX19_T7 | ATCAACTTGCATAAGTGGCACCGAGTCGGTGCTTTTTTT |
| AAVS | AGTAATAATACGACTCACTATAGGGAGAGTTCACTGCCGTATAGGCAGAGGGCCAC |
| Csy4 | TAGGGACAGGATGTCTCAGAGCTAGAAATAGCAAGTTGAGATAAGGCTAGTCCGTT |
| AX19_T7 | ATCAACTTGCATAAGTGGCACCGAGTCGGTGCTTTTTTT |
| AAVS | AGTAATAATACGACTCACTATAGGGAGAGTTCACTGCCGTATAGGCAGTGGGCCAC |
| Csy4 | TAGGGACAGGATGTCTCAGAGCTAGAAATAGCAAGTTGAGATAAGGCTAGTCCGTT |
| TX19_T7 | ATCAACTTGCATAAGTGGCACCGAGTCGGTGCTTTTTTT |
| AAVS | AGTAATAATACGACTCACTATAGGGAGAGTTCACTGCCGTATAGGCAGCGGGCCAC |
| Csy4 | TAGGGACAGGATGTCTCAGAGCTAGAAATAGCAAGTTGAGATAAGGCTAGTCCGTT |
| CX19_T7 | ATCAACTTGCATAAGTGGCACCGAGTCGGTGCTTTTTTT |
| AAVS- | AGTAATAATACGACTCACTATAGGGGGCCACTAGGGACAGGATGTCTCAGAGCTAG |
| 1 bp | AAATAGCAAGTTGAGATAAGGCTAGTCCGTTATCAACTGCATAGTGGCACCGAGTC |
| HP1_T7 | GGTGCTTTTTTT |
| AAVS- | AGTAATAATACGACTCACTATAGGGGGCCACTAGGGACAGGATGTCTCAGAGCTAG |
| 2 bp | AAATAGCAAGTTGAGATAAGGCTAGTCCGTTATCAACTCATGTGGCACCGAGTCGG |
| HP1_T7 | TGCTTTTTTT |
| AAVS- | AGTAATAATACGACTCACTATAGGGGGCCACTAGGGACAGGATGTCTCAGAGCTAG |
| 4 bp | AAATAGCAAGTTGAGATAAGGCTAGTCCGTTATCAACTATTGGCACCGAGTCGGTG |
| HP1_T7 | CTTTTTTT |
| AAVS | AGTAATAATACGACTCACTATAGGGGGCCACTAGGGACAGGATGTCTCAGAGCTAG |
| Delete | AAATAGCAAGTTGAGATAAGGCTAGTCCGTTATCAACTTGGCACCGAGTCGGTGCT |
| HP1_T7 | TTTTTT |
| AAVS- | AGTAATAATACGACTCACTATAGGGGGCCACTAGGGACAGGATGTCTCAGAGCTAG |
| 2 bp | AAATAGCAAGTTGAGATAAGGCTAGTCCGTTATCAACTTGCATAAGTGGCACAGTG |
| HP2_T7 | TGCTTTTTTT |
| AAVS- | AGTAATAATACGACTCACTATAGGGGGCCACTAGGGACAGGATGTCTCAGAGCTAG |
| 4 bp | AAATAGCAAGTTGAGATAAGGCTAGTCCGTTATCAACTTGCATAAGTGGCAGTGCT |
| HP2_T7 | TTTTTT |
| AAVS- | AGTAATAATACGACTCACTATAGGGGGCCACTAGGGACAGGATGTCTCAGAGCTAG |
| 7 bp | AAATAGCAAGTTGAGATAAGGCTAGTCCGTTATCAACTTGCATAAGTGAGTTTTTT |
| HP2_T7 | TT |
| AAVS | AGTAATAATACGACTCACTATAGGGGGCCACTAGGGACAGGATGTCTCAGAGCTAG |
| Delete | AAATAGCAAGTTGAGATAAGGCTAGTCCGTTATCAACTTGCATAAGTGGTTTTTTT |
| HP2_T7 | |
| AAVS- | AGTAATAATACGACTCACTATAGGGGGCCACTAGGGACAGGATGTCTCAGAGTAGA |
| 1 bp | AATACAAGTTGAGATAAGGCTAGTCCGTTATCAACTTGCATAAGTGCACCGAGTCG |
| Rp/Arp_ | GTGCTTTTTTT |
| mid | |
| AAVS- | AGTAATAATACGACTCACTATAGGGGGCCACTAGGGACAGGATGTCTCAGAGAGAA |
| 2 bp | ATCAAGTTGAGATAAGGCTAGTCCGTTATCAACTTGCATAAGTGCACCGAGTCGGT |
| Rp/Arp_ | GCTTTTTTT |
| mid | |
| AAVS- | AGTAATAATACGACTCACTATAGGGGGCCACTAGGGACAGGATGTCTCAGAGAGAA |
| 3 bp | TCAAGTTGAGATAAGGCTAGTCCGTTATCAACTTGCATAAGTGCACCGAGTCGGTG |
| Rp/Arp_ | CTTTTTTT |
| mid | |
| AAVS | AGTAATAATACGACTCACTATAGGGGGCCACTAGGGACAGGATGTCTCAGAGACAA |
| GV- | GTTGAGATAAGGCTAGTCCGTTATCAACTTGCATAAGTGCACCGAGTCGGTGCTTT |
| 11_mid | TTTT |
| AAVS- | AGTAATAATACGACTCACTATAGGGGGCCACTAGGGACAGGATGTCTCAGAGCTAG |
| 2 bp | AAATAGCAAGTTGAGATAAGGCTAGTCCGTTATCAACTGCATAGTGGCACAGTGTG |
| HP1/ | CTTTTTTT |
| HP2_T7 | |
| AAVS- | AGTAATAATACGACTCACTATAGGGGGCCACTAGGGACAGGATGTCTCAGAGCTAG |
| 4 bp | AAATAGCAAGTTGAGATAAGGCTAGTCCGTTATCAACTCATGTGGCAGTGCTTTTT |
| HP1/ | TT |
| HP2_T7 | |
| AAVS- | AGTAATAATACGACTCACTATAGGGGGCCACTAGGGACAGGATGTCTCAGAGCTAG |
| 7 bp | AAATAGCAAGTTGAGATAAGGCTAGTCCGTTATCAACTATTGAGTTTTTTTT |
| HP1/ | |
| HP2_T7 | |
| AAVS | AGTAATAATACGACTCACTATAGGGGGCCACTAGGGACAGGATGTCTCAGAGCTAG |
| Delete | AAATAGCAAGTTGAGATAAGGCTAGTCCGTTATCAACTTGGTTTTTTT |
| HP1/ | |
| 2_T7 | |
| AAVS | AGTAATAATACGACTCACTATAGGGGGCCACTAGGGACAGGATGTCTCAGAGTAGA |
| miniGV | AATACAAGTTGAGATAAGGCTAGTCCGTTATCAACTGCATAGTGCACCGAGTCGGT |
| −01_T7 | GCTTTTTTT |
| AAVS | AGTAATAATACGACTCACTATAGGGGGCCACTAGGGACAGGATGTCTCAGAGAGAA |
| miniGV- | ATCAAGTTGAGATAAGGCTAGTCCGTTATCAACTCATGTGCACCGAGTCGGTGCTT |
| 02_T7 | TTTTT |
| AAVS | AGTAATAATACGACTCACTATAGGGGGCCACTAGGGACAGGATGTCTCAGAGAGAA |
| miniGV- | TCAAGTTGAGATAAGGCTAGTCCGTTATCAACTATTGCACCGAGTCGGTGCTTTTT |
| 03_T7 | TT |
| AAVS | AGTAATAATACGACTCACTATAGGGGGCCACTAGGGACAGGATGTCTCAGAGACAA |
| miniGV- | GTTGAGATAAGGCTAGTCCGTTATCAACTTGCACCGAGTCGGTGCTTTTTTT |
| 04_T7 | |
| AAVS | AGTAATAATACGACTCACTATAGGGGGCCACTAGGGACAGGATGTCTCAGAGTAGA |
| miniGV- | AATACAAGTTGAGATAAGGCTAGTCCGTTATCAACTGCATAGTGGCACAGTGTGCT |
| 05_T7 | TTTTTT |
| AAVS | AGTAATAATACGACTCACTATAGGGGGCCACTAGGGACAGGATGTCTCAGAGAGAA |
| miniGV- | ATCAAGTTGAGATAAGGCTAGTCCGTTATCAACTCATGTGGCAGTGCTTTTTTT |
| 06_T7 | |
| AAVS | AGTAATAATACGACTCACTATAGGGGGCCACTAGGGACAGGATGTCTCAGAGAGAA |
| miniGV- | TCAAGTTGAGATAAGGCTAGTCCGTTATCAACTATTGAGTTTTTTTT |
| 07_T7 | |
| AAVS | AGTAATAATACGACTCACTATAGGGGGCCACTAGGGACAGGATGTCTCAGAGACAA |
| miniGV- | GTTGAGATAAGGCTAGTCCGTTATCAACTTGGTTTTTTT |
| 08_T7 | |
| EMX | AGTAATAATACGACTCACTATAGGAGTCCGAGCAGAAGAAGAAGTCTCAGAGCTAG |
| wt_T7 | AAATAGCAAGTTGAGATAAGGCTAGTCCGTTATCAACTTGAAAAAGTGGCACCGAG |
| | TCGGTGCTTTTTTT |
| EMX | AGTAATAATACGACTCACTATAGGAGTCCGAGCAGAAGAAGAAGTCTCAGAGCTAG |
| GNR | AAATAGCAAGTTGAGATAAGGCTAGTCCGTTATCAACTTGCATAAGTGGCACCGAG |
| loop_T7 | TCGGTGCTTTTTTT |
| EMX | AGTAATAATACGACTCACTATAGGAGTCCGAGCAGAAGAAGAAGTCTCAGAGCTAG |
| Csy4 | AAATAGCAAGTTGAGATAAGGCTAGTCCGTTATCAACTTGTATAAAGTGGCACCGA |
| loop_T7 | GTCGGTGCTTTTTTT |
| EMX | AGTAATAATACGACTCACTATAGGGAGAGTTCACTGCCGTATAGGCAGGAGTCCGA |
| Csy4 | GCAGAAGAAGAAGTCTCAGAGCTAGAAATAGCAAGTTGAGATAAGGCTAGTCCGTT |
| GX19_T7 | ATCAACTTGCATAAGTGGCACCGAGTCGGTGCTTTTTTT |
| EMX | AGTAATAATACGACTCACTATAGGGAGAGTTCACTGCCGTATAGGCAGAAGTCCGA |
| Csy4 | GCAGAAGAAGAAGTCTCAGAGCTAGAAATAGCAAGTTGAGATAAGGCTAGTCCGTT |
| AX19_T7 | ATCAACTTGCATAAGTGGCACCGAGTCGGTGCTTTTTTT |
| EMX | AGTAATAATACGACTCACTATAGGGAGAGTTCACTGCCGTATAGGCAGTAGTCCGA |
| Csy4 | GCAGAAGAAGAAGTCTCAGAGCTAGAAATAGCAAGTTGAGATAAGGCTAGTCCGTT |
| TX19_T7 | ATCAACTTGCATAAGTGGCACCGAGTCGGTGCTTTTTTT |
| EMX | AGTAATAATACGACTCACTATAGGGAGAGTTCACTGCCGTATAGGCAGCAGTCCGA |
| Csy4 | GCAGAAGAAGAAGTCTCAGAGCTAGAAATAGCAAGTTGAGATAAGGCTAGTCCGTT |
| CX19_T7 | ATCAACTTGCATAAGTGGCACCGAGTCGGTGCTTTTTTT |
| EMX- | AGTAATAATACGACTCACTATAGGAGTCCGAGCAGAAGAAGAAGTCTCAGAGCTAG |
| 1 bp | AAATAGCAAGTTGAGATAAGGCTAGTCCGTTATCAACTGCATAGTGGCACCGAGTC |
| HP1_T7 | GGTGCTTTTTTT |
| EMX- | AGTAATAATACGACTCACTATAGGAGTCCGAGCAGAAGAAGAAGTCTCAGAGCTAG |
| 2 bp | AAATAGCAAGTTGAGATAAGGCTAGTCCGTTATCAACTCATGTGGCACCGAGTCGG |
| HP1_T7 | TGCTTTTTTT |
| EMX- | AGTAATAATACGACTCACTATAGGAGTCCGAGCAGAAGAAGAAGTCTCAGAGCTAG |
| 4 bp | AAATAGCAAGTTGAGATAAGGCTAGTCCGTTATCAACTATTGGCACCGAGTCGGTG |
| HP1_T7 | CTTTTTTT |
| EMX | AGTAATAATACGACTCACTATAGGAGTCCGAGCAGAAGAAGAAGTCTCAGAGCTAG |
| Delete | AAATAGCAAGTTGAGATAAGGCTAGTCCGTTATCAACTTGGCACCGAGTCGGTGCT |
| HP1_T7 | TTTTTT |
| EMX- | AGTAATAATACGACTCACTATAGGAGTCCGAGCAGAAGAAGAAGTCTCAGAGCTAG |
| 2 bp | AAATAGCAAGTTGAGATAAGGCTAGTCCGTTATCAACTTGCATAAGTGGCACAGTG |
| HP2_T7 | TGCTTTTTTT |
| EMX- | AGTAATAATACGACTCACTATAGGAGTCCGAGCAGAAGAAGAAGTCTCAGAGCTAG |
| 4 bp | AAATAGCAAGTTGAGATAAGGCTAGTCCGTTATCAACTTGCATAAGTGGCAGTGCT |
| HP2_T7 | TTTTTT |
| EMX- | AGTAATAATACGACTCACTATAGGAGTCCGAGCAGAAGAAGAAGTCTCAGAGCTAG |
| 7 bp | AAATAGCAAGTTGAGATAAGGCTAGTCCGTTATCAACTTGCATAAGTGAGTTTTTT |
| HP2_T7 | TT |
| EMX | AGTAATAATACGACTCACTATAGGAGTCCGAGCAGAAGAAGAAGTCTCAGAGCTAG |
| Delete | AAATAGCAAGTTGAGATAAGGCTAGTCCGTTATCAACTTGCATAAGTGGTTTTTTT |
| HP2_T7 | |
| EMX- | AGTAATAATACGACTCACTATAGGAGTCCGAGCAGAAGAAGAAGTCTCAGAGTAGA |
| 1 bp | AATACAAGTTGAGATAAGGCTAGTCCGTTATCAACTTGCATAAGTGCACCGAGTCG |
| Rp/ | GTGCTTTTTTT |
| Arp_T7 | |
| EMX- | AGTAATAATACGACTCACTATAGGAGTCCGAGCAGAAGAAGAAGTCTCAGAGAGAA |
| 2 bp | ATCAAGTTGAGATAAGGCTAGTCCGTTATCAACTTGCATAAGTGCACCGAGTCGGT |
| Rp/ | GCTTTTTTT |
| Arp_T7 | |
| EMX- | |
| 3 bp | AGTAATAATACGACTCACTATAGGAGTCCGAGCAGAAGAAGAAGTCTCAGAGAGAA |
| Rp/ | TCAAGTTGAGATAAGGCTAGTCCGTTATCAACTTGCATAAGTGCACCGAGTCGGTG |
| Arp_T7 | CTTTTTTT |
| EMX | AGTAATAATACGACTCACTATAGGAGTCCGAGCAGAAGAAGAAGTCTCAGAGACAA |
| GV- | GTTGAGATAAGGCTAGTCCGTTATCAACTTGCATAAGTGCACCGAGTCGGTGCTTT |
| 11_T7 | TTTT |
| EMX- | AGTAATAATACGACTCACTATAGGAGTCCGAGCAGAAGAAGAAGTCTCAGAGCTAG |
| 2 bp | AAATAGCAAGTTGAGATAAGGCTAGTCCGTTATCAACTGCATAGTGGCACAGTGTG |
| HP1/ | CTTTTTTT |
| HP2_T7 | |
| EMX- | AGTAATAATACGACTCACTATAGGAGTCCGAGCAGAAGAAGAAGTCTCAGAGCTAG |
| 4 bp | AAATAGCAAGTTGAGATAAGGCTAGTCCGTTATCAACTCATGTGGCAGTGCTTTTT |
| HP1/ | TT |
| HP2_T7 | |
| EMX- | AGTAATAATACGACTCACTATAGGAGTCCGAGCAGAAGAAGAAGTCTCAGAGCTAG |
| 7 bp | AAATAGCAAGTTGAGATAAGGCTAGTCCGTTATCAACTATTGAGTTTTTTTT |
| HP1/ | |
| HP2_T7 | |
| EMX | AGTAATAATACGACTCACTATAGGAGTCCGAGCAGAAGAAGAAGTCTCAGAGCTAG |
| Delete | AAATAGCAAGTTGAGATAAGGCTAGTCCGTTATCAACTTGGTTTTTTT |
| HP1/ | |
| 2_T7 | |
| EMX | AGTAATAATACGACTCACTATAGGAGTCCGAGCAGAAGAAGAAGTCTCAGAGTAGA |
| miniGV- | AATACAAGTTGAGATAAGGCTAGTCCGTTATCAACTGCATAGTGCACCGAGTCGGT |
| 01_T7 | GCTTTTTTT |
| EMX | AGTAATAATACGACTCACTATAGGAGTCCGAGCAGAAGAAGAAGTCTCAGAGAGAA |
| miniGV- | ATCAAGTTGAGATAAGGCTAGTCCGTTATCAACTCATGTGCACCGAGTCGGTGCTT |
| 02_T7 | TTTTT |
| EMX | AGTAATAATACGACTCACTATAGGAGTCCGAGCAGAAGAAGAAGTCTCAGAGAGAA |
| miniGV- | TCAAGTTGAGATAAGGCTAGTCCGTTATCAACTATTGCACCGAGTCGGTGCTTTTT |
| 03_T7 | TT |
| EMX | AGTAATAATACGACTCACTATAGGAGTCCGAGCAGAAGAAGAAGTCTCAGAGACAA |
| miniGV- | GTTGAGATAAGGCTAGTCCGTTATCAACTTGCACCGAGTCGGTGCTTTTTTT |
| 04_T7 | |
| EMX | AGTAATAATACGACTCACTATAGGAGTCCGAGCAGAAGAAGAAGTCTCAGAGTAGA |
| miniGV- | AATACAAGTTGAGATAAGGCTAGTCCGTTATCAACTGCATAGTGGCACAGTGTGCT |
| 05_T7 | TTTTTT |
| EMX | AGTAATAATACGACTCACTATAGGAGTCCGAGCAGAAGAAGAAGTCTCAGAGAGAA |
| miniGV- | ATCAAGTTGAGATAAGGCTAGTCCGTTATCAACTCATGTGGCAGTGCTTTTTTT |
| 06_T7 | |
| EMX | AGTAATAATACGACTCACTATAGGAGTCCGAGCAGAAGAAGAAGTCTCAGAGAGAA |
| miniGV- | TCAAGTTGAGATAAGGCTAGTCCGTTATCAACTATTGAGTTTTTTTT |
| 07_T7 | |
| EMX | AGTAATAATACGACTCACTATAGGAGTCCGAGCAGAAGAAGAAGTCTCAGAGACAA |
| miniGV- | GTTGAGATAAGGCTAGTCCGTTATCAACTTGGTTTTTTT |
| 08_T7 | |
| VEGFA | AGTAATAATACGACTCACTATAGGGGTGGGGGGAGTTTGCTCCGTCTCAGAGCTAG |
| wt_T7 | AAATAGCAAGTTGAGATAAGGCTAGTCCGTTATCAACTTGAAAAAGTGGCACCGAG |
| | TCGGTGCTTTTTTT |
| VEGFA | AGTAATAATACGACTCACTATAGGGGTGGGGGGAGTTTGCTCCGTCTCAGAGCTAG |
| GNR | AAATAGCAAGTTGAGATAAGGCTAGTCCGTTATCAACTTGCATAAGTGGCACCGAG |
| loop_T7 | TCGGTGCTTTTTTT |
| VEGFA | AGTAATAATACGACTCACTATAGGGGTGGGGGGAGTTTGCTCCGTCTCAGAGCTAG |
| Csy4 | AAATAGCAAGTTGAGATAAGGCTAGTCCGTTATCAACTTGTATAAAGTGGCACCGA |
| loop_T7 | GTCGGTGCTTTTTTT |
| VEGFA | AGTAATAATACGACTCACTATAGGGAGAGTTCACTGCCGTATAGGCAGGGGTGGGG |
| Csy4 | GGAGTTTGCTCCGTCTCAGAGCTAGAAATAGCAAGTTGAGATAAGGCTAGTCCGTT |
| GX19_T7 | ATCAACTTGCATAAGTGGCACCGAGTCGGTGCTTTTTTT |
| VEGFA | AGTAATAATACGACTCACTATAGGGAGAGTTCACTGCCGTATAGGCAGAGGTGGGG |
| Csy4 | GGAGTTTGCTCCGTCTCAGAGCTAGAAATAGCAAGTTGAGATAAGGCTAGTCCGTT |
| AX19_T7 | ATCAACTTGCATAAGTGGCACCGAGTCGGTGCTTTTTTT |
| VEGFA | AGTAATAATACGACTCACTATAGGGAGAGTTCACTGCCGTATAGGCAGTGGTGGGG |
| Csy4 | GGAGTTTGCTCCGTCTCAGAGCTAGAAATAGCAAGTTGAGATAAGGCTAGTCCGTT |
| TX19_T7 | ATCAACTTGCATAAGTGGCACCGAGTCGGTGCTTTTTTT |
| VEGFA | AGTAATAATACGACTCACTATAGGGAGAGTTCACTGCCGTATAGGCAGCGGTGGGG |
| Csy4 | GGAGTTTGCTCCGTCTCAGAGCTAGAAATAGCAAGTTGAGATAAGGCTAGTCCGTT |
| CX19_T7 | ATCAACTTGCATAAGTGGCACCGAGTCGGTGCTTTTTTT |
| VEGFA- | AGTAATAATACGACTCACTATAGGGGTGGGGGGAGTTTGCTCCGTCTCAGAGCTAG |
| 1 bp | AAATAGCAAGTTGAGATAAGGCTAGTCCGTTATCAACTGCATAGTGGCACCGAGTC |
| HP1_T7 | GGTGCTTTTTTT |
| VEGFA- | AGTAATAATACGACTCACTATAGGGGTGGGGGGAGTTTGCTCCGTCTCAGAGCTAG |
| 2 bp | AAATAGCAAGTTGAGATAAGGCTAGTCCGTTATCAACTCATGTGGCACCGAGTCGG |
| HP1_T7 | TGCTTTTTTT |
| VEGFA- | AGTAATAATACGACTCACTATAGGGGTGGGGGGAGTTTGCTCCGTCTCAGAGCTAG |
| 4 bp | AAATAGCAAGTTGAGATAAGGCTAGTCCGTTATCAACTATTGGCACCGAGTCGGTG |
| HP1_T7 | CTTTTTTT |
| VEGFA | AGTAATAATACGACTCACTATAGGGGTGGGGGGAGTTTGCTCCGTCTCAGAGCTAG |
| Delete | AAATAGCAAGTTGAGATAAGGCTAGTCCGTTATCAACTTGGCACCGAGTCGGTGCT |
| HP1_T7 | TTTTTT |
| VEGFA- | AGTAATAATACGACTCACTATAGGGGTGGGGGGAGTTTGCTCCGTCTCAGAGCTAG |
| 2 bp | AAATAGCAAGTTGAGATAAGGCTAGTCCGTTATCAACTTGCATAAGTGGCACAGTG |
| HP2_T7 | TGCTTTTTTT |
| VEGFA- | AGTAATAATACGACTCACTATAGGGGTGGGGGGAGTTTGCTCCGTCTCAGAGCTAG |
| 4 bp | AAATAGCAAGTTGAGATAAGGCTAGTCCGTTATCAACTTGCATAAGTGGCAGTGCT |
| HP2_T7 | TTTTTT |
| VEGFA- | AGTAATAATACGACTCACTATAGGGGTGGGGGGAGTTTGCTCCGTCTCAGAGCTAG |
| 7 bp | AAATAGCAAGTTGAGATAAGGCTAGTCCGTTATCAACTTGCATAAGTGAGTTTTTT |
| HP2_T7 | TT |
| VEGFA | |
| Delete | AGTAATAATACGACTCACTATAGGGGTGGGGGGAGTTTGCTCCGTCTCAGAGCTAG |
| HP2_T7 | AAATAGCAAGTTGAGATAAGGCTAGTCCGTTATCAACTTGCATAAGTGGTTTTTTT |
| VEGFA- | |
| 1 bp | AGTAATAATACGACTCACTATAGGGGTGGGGGGAGTTTGCTCCGTCTCAGAGTAGA |
| Rp/ | AATACAAGTTGAGATAAGGCTAGTCCGTTATCAACTTGCATAAGTGCACCGAGTCG |
| Arp_T7 | GTGCTTTTTTT |
| VEGFA- | AGTAATAATACGACTCACTATAGGGGTGGGGGGAGTTTGCTCCGTCTCAGAGAGAA |
| 2 bp | ATCAAGTTGAGATAAGGCTAGTCCGTTATCAACTTGCATAAGTGCACCGAGTCGGT |
| Rp/ | GCTTTTTTT |
| Arp_T7 | |
| VEGFA | AGTAATAATACGACTCACTATAGGGGTGGGGGGAGTTTGCTCCGTCTCAGAGAGAA |
| -3 bp | TCAAGTTGAGATAAGGCTAGTCCGTTATCAACTTGCATAAGTGCACCGAGTCGGTG |
| Rp/ | CTTTTTTT |
| Arp_T7 | |
| VEGFA | AGTAATAATACGACTCACTATAGGGGTGGGGGGAGTTTGCTCCGTCTCAGAGACAA |
| GV- | GTTGAGATAAGGCTAGTCCGTTATCAACTTGCATAAGTGCACCGAGTCGGTGCTTT |
| 11_T7 | TTTT |
| VEGFA- | AGTAATAATACGACTCACTATAGGGGTGGGGGGAGTTTGCTCCGTCTCAGAGCTAG |
| 2 bp | AAATAGCAAGTTGAGATAAGGCTAGTCCGTTATCAACTGCATAGTGGCACAGTGTG |
| HP1/ | CTTTTTTT |
| HP2_T7 | |
| VEGFA- | AGTAATAATACGACTCACTATAGGGGTGGGGGGAGTTTGCTCCGTCTCAGAGCTAG |
| 4 bp | AAATAGCAAGTTGAGATAAGGCTAGTCCGTTATCAACTCATGTGGCAGTGCTTTTT |
| HP1/ | TT |
| HP2_T7 | |
| VEGFA | AGTAATAATACGACTCACTATAGGGGTGGGGGGAGTTTGCTCCGTCTCAGAGCTAG |
| -7 bp | AAATAGCAAGTTGAGATAAGGCTAGTCCGTTATCAACTATTGAGTTTTTTTT |
| HP1/ | |
| HP2_T7 | |
| VEGFA | AGTAATAATACGACTCACTATAGGGGTGGGGGGAGTTTGCTCCGTCTCAGAGCTAG |
| Delete | AAATAGCAAGTTGAGATAAGGCTAGTCCGTTATCAACTTGGTTTTTTT |
| HP1/ | |
| 2_T7 | |
| VEGFA | AGTAATAATACGACTCACTATAGGGGTGGGGGGAGTTTGCTCCGTCTCAGAGTAGA |
| miniGV- | AATACAAGTTGAGATAAGGCTAGTCCGTTATCAACTGCATAGTGCACCGAGTCGGT |
| 01_T7 | GCTTTTTTT |
| VEGFA | AGTAATAATACGACTCACTATAGGGGTGGGGGGAGTTTGCTCCGTCTCAGAGAGAA |
| miniGV- | ATCAAGTTGAGATAAGGCTAGTCCGTTATCAACTCATGTGCACCGAGTCGGTGCTT |
| 02_T7 | TTTTT |
| VEGFA | AGTAATAATACGACTCACTATAGGGGTGGGGGGAGTTTGCTCCGTCTCAGAGAGAA |
| miniGV- | TCAAGTTGAGATAAGGCTAGTCCGTTATCAACTATTGCACCGAGTCGGTGCTTTTT |
| 03_T7 | TT |
| VEGFA | AGTAATAATACGACTCACTATAGGGGTGGGGGGAGTTTGCTCCGTCTCAGAGACAA |
| miniGV- | GTTGAGATAAGGCTAGTCCGTTATCAACTTGCACCGAGTCGGTGCTTTTTTT |
| 04_T7 | |
| VEGFA | AGTAATAATACGACTCACTATAGGGGTGGGGGGAGTTTGCTCCGTCTCAGAGTAGA |
| miniGV- | AATACAAGTTGAGATAAGGCTAGTCCGTTATCAACTGCATAGTGGCACAGTGTGCT |
| 05_T7 | TTTTTT |
| VEGFA | AGTAATAATACGACTCACTATAGGGGTGGGGGGAGTTTGCTCCGTCTCAGAGAGAA |
| miniGV- | ATCAAGTTGAGATAAGGCTAGTCCGTTATCAACTCATGTGGCAGTGCTTTTTTT |
| 06_T7 | |
| VEGFA | AGTAATAATACGACTCACTATAGGGGTGGGGGGAGTTTGCTCCGTCTCAGAGAGAA |
| miniGV- | TCAAGTTGAGATAAGGCTAGTCCGTTATCAACTATTGAGTTTTTTTT |
| 07_T7 | |
| VEGFA | AGTAATAATACGACTCACTATAGGGGTGGGGGGAGTTTGCTCCGTCTCAGAGACAA |
| miniGV- | GTTGAGATAAGGCTAGTCCGTTATCAACTTGGTTTTTTT |
| 08_T7 | |

What is claimed is:

1. A composition comprising an engineered nucleoprotein complex, wherein said engineered nucleoprotein complex comprises:
(a) a Cas9 polypeptide; and
(b) a engineered nucleic acid-targeting nucleic acid wherein said engineered nucleic acid-targeting nucleic acid comprises an engineered region selected from the group consisting of: an engineered stem loop duplex structure, an engineered bulge region, an engineered hairpin located 3′ of the stem loop duplex structure, and any combination thereof;
wherein said engineered nucleoprotein complex results in a modification of a target region of a genomic DNA;
wherein said engineered nucleoprotein complex has a decreased ability to modify a DNA molecule in a region that is not said target region as compared to a control nucleoprotein complex that does not comprise an engineered stem loop duplex structure, an engineered bulge region, and an engineered hairpin located 3′ of the stem loop duplex structure.

2. A composition comprising a cell modified with the engineered nucleoprotein complex of claim 1.

3. The composition of claim 2, wherein said cell comprises a eukaryotic cell.

4. The composition of claim 3, wherein said cell comprises a stem cell.

5. The composition of claim 1, wherein said engineered nucleic acid-targeting nucleic acid comprises RNA nucleobases.

6. The composition of claim 1 wherein said engineered nucleic acid-targeting nucleic acid is RNA.

7. The composition of claim 1, wherein said engineered nucleic acid-targeting nucleic acid comprises modified nucleobases.

8. The composition of claim 1, wherein said engineered nucleic acid-targeting nucleic acid further comprises a covalently linked moiety.

9. The composition of claim 1, wherein said engineered nucleic acid-targeting nucleic acid comprises one or more mutations in said engineered region selected from the group consisting of: an engineered stem loop duplex structure, an engineered bulge region, an engineered hairpin located 3′ of the stem loop duplex structure, and any combination thereof.

10. The composition of claim 9, wherein said one or more mutations comprises an insertion of one or more nucleotides.

11. The composition of claim 9, wherein said one or more mutation comprises a deletion of one or more nucleotides.

12. The composition of claim 9, wherein said one or more mutations comprises a substitution of one or more nucleotides with a modified nucleotide.

13. The composition of claim 1, wherein said engineered nucleic acid-targeting nucleic acid comprises two or more mutations in said engineered region selected from the group consisting of: an engineered stem loop duplex structure, an engineered bulge region, an engineered hairpin located 3′ of the stem loop duplex structure, and any combination thereof, and a first mutation is separated by at least one nucleotide from a second mutation.

14. The composition of claim 1, wherein said engineered nucleic acid-targeting nucleic acid comprises two or more mutations in said engineered region selected from the group consisting of: an engineered stem loop duplex structure, an engineered bulge region, an engineered hairpin located 3′ of the stem loop duplex structure, and any combination thereof, and a first mutation is adjacent to a second mutation.

15. The composition of claim 1, wherein said engineered nucleoprotein complex has about a 10% decreased ability to modify said DNA molecule in a region that is not said target region as compared to said control nucleoprotein complex.

16. The composition of claim 1, wherein said engineered region is an engineered stem loop duplex structure.

17. The composition of claim 1, wherein said engineered region is an engineered bulge region.

18. The composition of claim 1, wherein said engineered region is an engineered hairpin located 3′ of the stem loop duplex structure.

19. The composition of claim 1, further comprising a spacer region located 5′ of the stem loop duplex structure.

20. The composition of claim 19, wherein said spacer region comprises between 18 to 21 nucleotides in length, inclusive.

21. The composition of claim 1, wherein said modification of the target region of the genomic DNA comprises cleavage of a phosphodiester bond.

22. A kit comprising:
(a) the composition of claim 1; and
(b) a suitable buffer.

23. The kit of claim 22, further comprising instructions for use.

24. A pharmaceutical composition comprising the cell of claim 2.

25. The pharmaceutical composition of claim 24, further comprising an excipient.

The application's sequence listing, which the Patent Office published only in electronic form, follows.

SEQUENCE LISTING (1758 sequences)

SEQ ID NO: 1 - protein, 1056 aa, Pasteurella multocida
MQTTNLSYILGLDLGIASVGWAVVEINENEDPIGLIDVGVRIFERAEVPKTGESLALSRRLARSTRRLIRRRAHRLLLAKRFLKREGILSTIDLEKGLPNQAWELRVAGLERRLSAIEWGAVLLHLIKHRGYLSKRKNESQTNNKELGALLSGVAQNHQLLQSDDYRTPAELALKKFAKEEGHIRNQRGAYTHTFNRLDLLAELNLLFAQQHQFGNPHCKEHIQQYMTELLMWQKPALSGEAILKMLGKCTHEKNEFKAAKHTYSAERFVWLTKLNNLRILEDGAERALNEEERQLLINHPYEKSKLTYAQVRKLLGLSEQAIFKHLRYSKENAESATFMELKAWHAIRKALENQGLKDTWQDLAKKPDLLDEIGTAFSLYKTDEDIQQYLTNKVPNSVINALLVSLNFDKFIELSLKSLRKILPLMEQGKRYDQACREIYGHHYGEANQKTSQLLPAIPAQEIRNPVVLRTLSQARKVINAIIRQYGSPARVHIETGRELGKSFKERREIQKQQEDNRTKRESAVQKFKELFSDFSSEPKSKDILKFRLYEQQHGKCLYSGKEINIHRLNEKGYVEIDHALPFSRTWDDSFNNKVLVLASENQNKGNQTPYEWLQGKINSERWKNFVALVLGSQCSAAKKQRLLTQVIDDNKFIDRNLNDTRYIARFLSNYIQENLLLVGKNKKNVFTPNGQITALLRSRWGLIKARENNNRHHALDAIVVACATPSMQQKITRFIRFKEVHPYKIENRYEMVDQESGEIISPHFPEPWAYFRQEVNIRVFDNHPDTVLKEMLPDRPQANHQFVQPLFVSRAPTRKMSGQGHMETIKSAKRLAEGISVLRIPLTQLKPNLLENMVNKEREPALYAGLKARLAEFNQDPAKAFATPFYKQGGQQVKAIRVEQVQKSGVLVRENNGVADNASIVRTDVFIKNNKFFLVPIYTWQVAKGILPNKAIVAHKNEDEWEEMDEGAKFKFSLFPNDLVELKTKKEYFFGYYIGLDRATGNISLKEHDGEISKGKDGVYRVGVKLALSFEKYQVDELGKNRQICRPQQRQPVR

SEQ ID NO: 2 - protein, 1368 aa, Streptococcus pyogenes [sequence omitted]

SEQ ID NO: 3 - protein, 1334 aa, Listeria innocua
MKKPYTIGLDIGTNSVGWAVLTDQYDLVKRKMKIAGDSEKKQIKKNFWGVRLFDEGQTAADRRMARTARRRIERRRNRISYLQGIFAEEMSKTDANFFCRLSDSFYVDNEKRNSRHPFFATIEEEVEYHKNYPTIYHLREELVNSSEKADLRLVYLALAHIIKYRGNFLIEGALDTQNTSVDGIYKQFIQTYNQVFASGIEDGSLKKLEDNKDVAKILVEKVTRKEKLERILKLYPGEKSAGMFAQFISLIVGSKGNFQKPFDLIEKSDIECAKDSYEEDLESLLALIGDEYAELFVAAKNAYSAVVLSSIITVAETETNAKLSASMIERFDTHEEDLGELKAFIKLHLPKHYEEIFSNTEKHGYAGYIDGKTKQADFYKYMKMTLENIEGADYFIAKIEKENFLRKQRTFDNGAIPHQLHLEELEAILHQQAKYYPFLKENYDKIKSLVTFRIPYFVGPLANGQSEFAWLTRKADGEIRPWNIEEKVDFGKSAVDFIEKMTNKDTYLPKENVLPKHSLCYQKYLVYNELTKVRYINDQGKTSYFSGQEKEQIFNDLFKQKRKVKKKDLELFLRNMSHVESPTIEGLEDSFNSSYSTYHDLLKVGIKQEILDNPVNTEMLENIVKILTVFEDKRMIKEQLQQFSDVLDGVVLKKLERRHYTGWGRLSAKLLMGIRDKQSHLTILDYLMNDDGLNRNLMQLINDSNLSFKSIIEKEQVTTADKDIQSIVADLAGSPAIKKGILQSLKIVDELVSVMGYPPQTIVVEMARENQTTGKGKNNSRPRYKSLEKAIKEFGSQILKEHPTDNQELRNNRLYLYYLQNGKDMYTGQDLDIHNLSNYDIDHIVPQSFITDNSIDNLVLTSSAGNREKGDDVPPLEIVRKRKVFWEKLYQGNLMSKRKFDYLTKAERGGLTEADKARFIHRQLVETRQITKNVANILHQRFNYEKDDHGNTMKQVRIVTLKSALVSQFRKQFQLYKVRDVNDYHHAHDAYLNGVVANTLLKVYPQLEPEFVYGDYHQFDWFKANKATAKKQFYTNIMLFFAQKDRIIDENGEILWDKKYLDTVKKVMSYRQMNIVKKTEIQKGEFSKATIKPKGNSSKLIPRKTNWDPMKYGGLDSPNMAYAVVIEYAKGKNKLVFEKKIIRVTIMERKAFEKDEKAFLEEQGYRQPKVLAKLPKYTLYECEEGRRRMLASANEAQKGNQQVLPNHLVTLLHHAANCEVSDGKSLDYIESNREMFAELLAHVSEFAKRYTLAEANLNKINQLFEQNKEGDIKAIAQSFVDLMAFNAMGAPASFKFFETTIERKRYNNLKELLNSTIIYQSITGLYESRKRLDD

SEQ ID NO: 4 - protein, 1368 aa, Streptococcus pyogenes
MDKKYSIGLDIGTNSVGWAVITDDYKVPSKKLKGLGNTDRHGIKKNLIGALLFDSGETAEATRLKRTARRRYTRRKNRICYLQEIFSNEMAKVDDSFFHRLEESFLVEEDKKHERHPIFGNIVDEVAYHEKYPTIYHLRKKLADSTDKVDLRLIYLALAHMIKFRGHFLIEGDLNPDNSDVDKLFIQLVQTYNQLFEENPINASRVDAKAILSARLSKSRRLENLIAQLPGEKKNGLFGNLIALSLGLTPNFKSNFDLAEDAKLQLSKDTYDDDLDNLLAQIGDQYADLFLAAKNLSDATLLSDILRVNSEITKAPLSASMIKRYDEHHQDLTLLKALVRQQLPEKYKEIFFDQSKNGYAGYIDGGASQEEFYKFIKPILEKMDGTEELLAKLNREDLLRKQRTFDNGSIPYQIHLGELHAILRRQEDFYPFLKDNREKIEKILTFRIPYYVGPLARGNSRFAWMTRKSEETITPWNFEEVVDKGASAQSFIERMTNFDKNLPNEKVLPKHSLLYEYFTVYNELTKVKYVTEGMRKPAFLSGEQKKAIVDLLFKTNRKVTVKQLKEDYFKKIECFDSVEISGVEDRFNASLGTYHDLLKIIKDKDFLDNEENEDILEDIVLTLTLFEDREMIEERLKTYAHLFDDKVMKQLKRRRYTGWGRLSRKLINGIRDKQSGKTILDFLKSDGFANRNFMQLIHDDSLTFKEDIQKAQVSGQGDSLHEHIANLAGSPAIKKGILQTVKVVDELVKVMGRHKPENIVIEMARENQTTQKGQKNSRERMKRIEEGIKELGSDILKEYPVENTQLQNEKLYLYYLQNGRDMYVDQELDINRLSDYDVDHIVPQSFLKDDSIDNKVLTRSDKNRGKSDNVPSEEVVKKMKNYWRQLLNAKLITQRKFDNLTKAERGGLSELDKVGFIKRQLVETRQITKHVAQILDSRMNTKYDENDKLIREVRVITLKSKLVSDFRKDFQFYKVREINNYHHAHDAYLNAVVGTALIKKYPKLESEFVYGDYKVYDVRKMIAKSEQEIGKATAKYFFYSNIMNFFKTEITLANGEIRKRPLIETNGETGEIVWDKGRDFATVRKVLSMPQVNIVKKTEVQTGGFSKESILPKRNSDKLIARKKDWDPKKYGGFDSPTVAYSVLVVAKVEKGKSKKLKSVKELLGITIMERSSFEKDPIDFLEAKGYKEVRKDLIIKLPKYSLFELENGRKRMLASAGELQKGNELALPSKYVNFLYLASHYEKLKGSPEDNEQKQLFVEQHKHYLDEIIEQISEFSKRVILADANLDKVLSAYNKHRDKPIREQAENIIHLFTLTNLGAPAAFKYFDTTIDRKRYTSTKEVLDATLIHQSITGLYETRIDLSQLGGD

SEQ ID NO: 5 - protein, 1370 aa, Streptococcus agalactiae
MNKPYSIGLDIGTNSVGWSIITDDYKVPAKKMRVLGNTDKEYIKKNLIGALLFDGGNTAADRRLKRTARRRYTRRRNRILYLQEIFAEEMSKVDDSFFHRLEDSFLVEEDKRGSKYPIFATLQEEKDYHEKFSTIYHLRKELADKKEKADLRLIYIALAHIIKFRGHFLIEDDSFDVRNTDISKQYQDFLEIFNTTFENNDLLSQNVDVEAILTDKISKSAKKDRILAQYPNQKSTGIFAEFLKLIVGNQADFKKYFNLEDKTPLQFAKDSYDEDLENLLGQIGDEFADLFSAAKKLYDSVLLSGILTVIDLSTKAPLSASMIQRYDEHREDLKQLKQFVKASLPEKYQEIFADSSKDGYAGYIEGKTNQEAFYKYLSKLLTKQEDSENFLEKIKNEDFLRKQRTFDNGSIPHQVHLTELKAIIRRQSEYYPFLKENQDRIEKILTFRIPYYIGPLAREKSDFAWMTRKTDDSIRPWNFEDLVDKEKSAEAFIHRMTNNDFYLPEEKVLPKHSLIYEKFTVYNELTKVRYKNEQGETYFFDSNIKQEIFDGVFKEHRKVSKKKLLDFLAKEYEEFRIVDVIGLDKENKAFNASLGTYHDLEKILDKDFLDNPDNESILEDIVQTLTLFEDREMIKKRLENYKDLFTESQLKKLYRRHYTGWGRLSAKLINGIRDKESQKTILDYLIDDGRSNRNFMQLINDDGLSFKSIISKAQAGSHSDNLKEVVGELAGSPAIKKGILQSLKIVDELVKVMGYEPEQIVVEMARENQTTNQGRRNSRQRYKLLDDGVKNLASDLNGNILKEYPTDNQALQNERLFLYYLQNGRDMYTGEALDIDNLSQYDIDHIIPQAFIKDDSIDNRVLVSSAKNRGKSDDVPSLEIVKDCKVFWKKLLDAKLMSQRKYDNLTKAERGGLTSDDKARFIQRQLVETRQITKHVARILDERFNNELDSKGRRIRKVKIVTLKSNLVSNFRKEFGFYKIREVNNYHHAHDAYLNAVVAKAILTKYPQLEPEFVYGDYPKYNSYKTRKSATEKLFFYSNIMNFFKTKVTLADGTVVVKDDIEVNNDTGEIVWDKKKHFATVRKVLSYPQNNIVKKTEIQTGGFSKESILAHGNSDKLIPRKTKDIYLDPKKYGGFDSPIVAYSVLVVADIKKGKAQKLKTVTELLGITIMERSRFEKNPSAFLESKGYLNIRADKLIILPKYSLFELENGRRRLLASAGELQKGNELALPTQFMKFLYLASRYNESKGKPEEIEKKQEFVNQHVSYFDDILQLINDFSKRVILADANLEKINKLYQDNKENISVDELANNIINLFTFTSLGAPAAFKFFDKIVDRKRYTSTKEVLNSTLIHQSITGLYETRIDLGKLGED

SEQ ID NO: 6 - protein, 1345 aa, Streptococcus mutans
MKKPYSIGLDIGTNSVGWAVVTDDYKVPAKKMKVLGNTDKSHIEKNLLGALLFDSGNTAEDRRLKRTARRRYTRRRNRILYLQEIFSEEMGKVDDSFFHRLEDSFLVTEDKRGERHPIFGNLEEEVKYHENFPTIYHLRQYLADNPEKVDLRLVYLALAHIIKFRGHFLIEGKFDTRNNDVQRLFQEFLAVYDNTFENSSLQEQNVQVEEILTDKISKSAKKDRVLKLFPNEKSNGRFAEFLKLIVGNQADFKKHFELEEKAPLQFSKDTYEEELEVLLAQIGDNYAELFLSAKKLYDSILLSGILTVTDVGTKAPLSASMIQRYNEHQMDLAQLKQFIRQKLSDKYNEVFSDVSKDGYAGYIDGKTNQEAFYKYLKGLLNKIEGSGYFLDKIEREDFLRKQRTFDNGSIPHQIHLQEMRAIIRRQAEFYPFLADNQDRIEKLLTFRIPYYVGPLARGKSDFAWLSRKSADKITPWNFDEIVDKESSAEAFINRMTNYDLYLPNQKVLPKHSLLYEKFTVYNELTKVKYKTEQGKTAFFDANMKQEIFDGVFKVYRKVTKDKLMDFLEKEFDEFRIVDLTGLDKENKVFNASYGTYHDLCKILDKDFLDNSKNEKILEDIVLTLTLFEDREMIRKRLENYSDLLTKEQVKKLERRHYTGWGRLSAELIHGIRNKESRKTILDYLIDDGNSNRNFMQLINDDALSFKEEIAKAQVIGETDNLNQVVSDIAGSPAIKKGILQSLKIVDELVKIMGHQPENIVVEMARENQFTNQGRRNSQQRLKGLTDSIKEFGSQILKEHPVENSQLQNDRLFLYYLQNGRDMYTGEELDIDYLSQYDIDHIIPQAFIKDNSIDNRVLTSSKENRGKSDDVPSKDVVRKMKSYWSKLLSAKLITQRKFDNLTKAERGGLTDDDKAGFIKRQLVETRQITKHVARILDERFNTETDENNKKIRQVKIVTLKSNLVSNFRKEFELYKVREINDYHHAHDAYLNAVIGKALLGVYPQLEPEFVYGDYPHFHGHKENKATAKKFFYSNIMNFFKKDDVRTDKNGEIIWKKDEHISNIKKVLSYPQVNIVKKVEEQTGGFSKESILPKGNSDKLIPRKTKKFYWDTKKYGGFDSPIVAYSILVIADIEKGKSKKLKTVKALVGVTIMEKMTFERDPVAFLERKGYRNVQEENIIKLPKYSLFKLENGRKRLLASARELQKGNEIVLPNHLGTLLYHAKNIHKVDEPKHLDYVDKHKDEFKELLDVVSNFSKKYTLAEGNLEKIKELYAQNNGEDLKELASSFINLLTFTAIGAPATFKFFDKNIDRKRYTSTTEILNATLIHQSITGLYETRIDLNKLGGD

SEQ ID NO: 7 - protein, 1377 aa, Streptococcus agalactiae
MNKPYSIGLDIGTNSVGWSIITDDYKVPAKKMRVLGNTDKEYIKKNLIGALLFDGGNTAADRRLKRTARRRYTRRRNRILYLQEIFAEEMSKVDDSFFHRLEDSFLVEEDKRGSKYPIFATMQEEKYYHEKFPTIYHLRKELADKKEKADLRLVYLALAHIIKFRGHFLIEDDRFDVRNTDIQKQYQAFLEIFDTTFENNHLLSQNVDVEAILTDKISKSAKKDRILAQYPNQKSTGIFAEFLKLIVGNQADFKKHFNLEDKTPLQFAKDSYDEDLENLLGQIGDEFADLFSVAKKLYDSVLLSGILTVTDLSTKAPLSASMIQRYDEHHEDLKHLKQFVKASLPENYREVFADSSKDGYAGYIEGKTNQEAFYKYLLKLLTKQEGSEYFLEKIKNEDFLRKQRTFDNGSIPHQVHLTELRAIIRRQSEYYPFLKENQDRIEKILTFRIPYYVGPLAREKSDFAWMTRKTDDSIRPWNFEDLVDKEKSAEAFIHRMTNNDLYLPEEKVLPKHSLIYEKFTVYNELTKVRFLAEGFKDFQFLNRKQKETIFNSLFKEKRKVTEKDIISFLNKVDGYEGIAIKGIEKQFNASLSTYHDLKKILGKDFLDNTDNELILEDIVQTLTLFEDREMIKKCLDIYKDFFTESQLKKLYRRHYTGWGRLSAKLINGIRNKENQKTILDYLIDDGSANRNFMQLINDDDLSFKPIIDKARTGSHSDNLKEVVGELAGSPAIKKGILQSLKIVDELVKVMGYEPEQIVVEMARENQTTAKGLSRSRQRLTTLRESLANLKSNILEEKKPKYVKDQVENHHLSDDRLFLYYLQNGRDMYTKKALDIDNLSQYDIDHIIPQAFIKDDSIDNRVLVSSAKNRGKSDDVPSIEIVKARKMFWKNLLDAKLMSQRKYDNLTKAERGGLTSDDKARFIQRQLVETRQITKHVARILDERFNNEVDNGKKICKVKIVTLKSNLVSNFRKEFGFYKIREVNDYHHAHDAYLNAVVAKAILTKYPQLEPEFVYGMYRQKKLSKIVHEDKEEKYSEATRKMFFYSNLMNMFKRVVRLADGSIVVRPVIETGRYMRKTAWDKKKHFATVRKVLSYPQNNIVKKTEIQTGGFSKESILAHGNSDKLIPRKTKDIYLDPKKYGGFDSPIVAYSVLVVADIKKGKAQKLKTVTELLGITIMERSRFEKNPSAFLESKGYLNIRDDKLMILPKYSLFELENGRRRLLASAGELQKGNELALPTQFMKFLYLASRYNESKGKPEEIEKKQEFVNQHVSYFDDILQLINDFSKRVILADANLEKINKLYQDNKENIPVDELANNIINLFTFTSLGAPAAFKFFDKIVDRKRYTSTKEVLNSTLIHQSITGLYETRIDLGKLGED

SEQ ID NO: 8 - protein, 1368 aa, Streptococcus pyogenes; identical to SEQ ID NO: 4

SEQ ID NO: 9 - protein, 131 aa, Helicobacter hepaticus
MRILGFDIGITSIGWAYVESNELKDCGVRIFTKAENPKNGDSLAAPRREARGARRRLARRKARLNAIKRLLCKEFELNLNDYLANDGELPKAYQTSKDTKSPYELYTAFHWIIFAFCSIASSLSNRQMLPI

SEQ ID NO: 10 - protein, 1059 aa, Wolinella succinogenes
MIERILGVDLGISSLGWAIVEYDKDDEAANRIIDCGVRLFTAAETPKKKESPNKARREARGIRRVLNRRRVRMNMIKKLFLRAGLIQDVDLDGEGGMFYSKANRADVWELRHDGLYRLLKGDELARVLIHIAKHRGYKFIGDDEADEESGKVKKAGVVLRQNFEAAGCRTVGEWLWRERGANGKKRNKHGDYEISIHRDLLVEEVEAIFVAQQEMRSTIATDALKAAYREIAFFVRPMQRIEKMVGHCTYFPEERRAPKSAPTAEKFIAISKFFSTVIIDNEGWEQKIIERKTLEELLDFAVSREKVEFRHLRKFLDLSDNEIFKGLHYKGKPKTAKKREATLFDPNEPTELEFDKVEAEKKAWISLRGAAKLREALGNEFYGRFVALGKHADEATKILTYYKDEGQKRRELTKLPLEAEMVERLVKIGFSDFLKLSLKAIRDILPAMESGARYDEAVLMLGVPHKEKSAILPPLNKTDIDILNPTVIRAFAQFRKVANALVRKYGAFDRVHFELAREINTKGEIEDIKESQRKNEKERKEAADWIAETSFQVPLTRKNILKKRLYIQQDGRCAYTGDVIELERLFDEGYCEIDHILPRSRSADDSFANKVLCLARANQQKTDRTPYEWFGHDAARWNAFETRTSAPSNRVRTGKGKIDRLLKKNFDENSEMAFKDRNLNDTRYMARAIKTYCEQYWVFKNSHTKAPVQVRSGKLTSVLRYQWGLESKDRESHTHHAVDAIIIAFSTQGMVQKLSEYYRFKETHREKERPKLAVPLANFRDAVEEATRIENTETVKEGVEVKRLLISRPPRARVTGQAHEQTAKPYPRIKQVKNKKKWRLAPIDEEKFESFKADRVASANQKNFYETSTIPRVDVYHKKGKFHLVPIYLHEMVLNELPNLSLGTNPEAMDENFFKFSIFKDDLISIQTQGTPKKPAKIIMGYFKNMHGANMVLSSINNSPCEGFTCTPVSMDKKHKDKCKLCPEENRIAGRCLQGFLDYWSQEGLRPPRKEFECDQGVKFALDVKKYQIDPLGYYYEVKQEKRLGTIPQMRSAKKLVKK

SEQ ID NO: 11 - protein, 1409 aa, Wolinella succinogenes
MLVSPISVDLGGKNTGFFSFTDSLDNSQSGTVIYDESFVLSQVGRRSKRHSKRNNLRNKLVKRLFLLILQEHHGLSIDVLPDEIRGLFNKRGYTYAGFELDEKKKDALESDTLKEFLSEKLQSIDRDSDVEDFLNQIASNAESFKDYKKGFEAVFASATHSPNKKLELKDELKSEYGENAKELLAGLRVTKEILDEFDKQENQGNLPRAKYFEELGEYIATNEKVKSFFDSNSLKLTDMTKLIGNISNYQLKELRRYFNDKEMEKGDIWIPNKLHKITERFVRSWHPKNDADRQRRAELMKDLKSKEIMELLTTTEPVMTIPPYDDMNNRGAVKCQTLRLNEEYLDKHLPNWRDIAKRLNHGKFNDDLADSTVKGYSEDSTLLHRLLDTSKEIDIYELRGKKPNELLVKTLGQSDANRLYGFAQNYYELIRQKVRAGIWVPVKNKDDSLNLEDNSNMLKRCNHNPPHKKNQIHNLVAGILGVKLDEAKFAEFEKELWSAKVGNKKLSAYCKNIEELRKTHGNTFKIDIEELRKKDPAELSKEEKAKLRLTDDVILNEWSQKIANFFDIDDKHRQRFNNLFSMAQLHTVIDTPRSGFSSTCKRCTAENRFRSETAFYNDETGEFHKKATATCQRLPADTQRPFSGKIERYIDKLGYELAKIKAKELEGMEAKEIKVPIILEQNAFEYEESLRKSKTGSNDRVINSKKDRDGKKLAKAKENAEDRLKDKDKRIKAFSSGICPYCGDTIGDDGEIDHILPRSHTLKIYGTVFNPEGNLIYVHQKCNQAKADSIYKLSDIKAGVSAQWIEEQVANIKGYKTFSVLSAEQQKAFRYALFLQNDNEAYKKVVDWLRTDQSARVNGTQKYLAKKIQEKLTKMLPNKHLSFEFILADATEVSELRRQYARQNPLLAKAEKQAPSSHAIDAVMAFVARYQKVFKDGTPPNADEVAKLAMLDSWNPASNEPLTKGLSTNQKIEKMIKSGDYGQKNMREVFGKSIFGENAIGERYKPIVVQEGGYYIGYPATVKKGYELKNCKVVTSKNDIAKLEKIIKNQDLISLKENQYIKIFSINKQTISELSNRYFNMNYKNLVERDKEIVGLLEFIVENCRYYTKKVDVKFAPKYIHETKYPFYDDWRRFDEAWRYLQENQNKTSSKDRFVIDKSSLNEYYQPDKNEYKLDVDTQPIWDDFCRWYFLDRYKTANDKKSIRIKARKTFSLLAESGVQGKVFRAKRKIPTGYAYQALPMDNNVIAGDYANILLEANSKTLSLVPKSGISIEKQLDKKLDVIKKTDVRGLAIDNNSFFNADFDTHGIRLIVENTSVKVGNFPISAIDKSAKRMIFRALFEKEKGKRKKKTTISFKESGPVQDYLKVFLKKIVKIQLRTDGSISNIVVRKNAADFTLSFRSEHIQKLLK

SEQ ID NO: 12 - protein, 1374 aa, Fusobacterium nucleatum
MKKQKFSDYYLGFDIGTNSVGWCVTDLDYNVLRFNKKDMWGSRLFDEAKTAAERRVQRNSRRRLKRRKWRLNLLEEIFSDEIMKIDSNFFRRLKESSLWLEDKNSKEKFTLFNDDNYKDYDFYKQYPTIFHLRDELIKNPEKKDIRLIYLALHSIFKSRGHFLFEGQNLKEIKNFETLYNNLISFLEDNGINKSIDKDNIEKLEKIICDSGKGLKDKEKEFKGIFNSDKQLVAIFKLSVGSSVSLNDLFDTDEYKKEEVEKEKISFREQIYEDDKPIYYSILGEKIELLDIAKSFYDFMVLNNILSDSNYISEAKVKLYEEHKKDLKNLKYIIRKYNKENYDKLFKDKNENNYPAYIGLNKEKDKKEVVEKSRLKIDDLIKVIKGYLPKPERIEEKDKTIFNEILNKIELKTILPKQRISDNGTLPYQIHEVELEKILENQSKYYDFLNYEENGVSTKDKLLKTFKFRIPYYVGPLNSYHKDKGGNSWIVRKEEGKILPWNFEQKVDIEKSAEEFIKRMTNKCTYLNGEDVIPKDSFLYSEYIILNELNKVQVNDEFLNEENKRKIIDELFKENKKVSEKKFKEYLLVNQIANRTVELKGIKDSFNSNYVSYIKFKDIFGEKLNLDIYKEISEKSILWKCLYGDDKKIFEKKIKNEYGDILNKDEIKKINSFKFNTWGRLSEKLLTGIEFINLETGECYSSVMEALRRTNYNLMELLSSKFTLQESIDNENKEMNEVSYRDLIEESYVSPSLKRAILQTLKIYEEIKKITGRVPKKVFIEMARGGDESMKNKKIPARQEQLKKLYDSCGNDIANFSIDIKEMKNSLSSYDNNSLRQKKLYLYYLQFGKCMYTGREIDLDRLLQNNDTYDIDHIYPRSKVIKDDSFDNLVLVLKNENAEKSNEYPVKKEIQEKMKSFWRFLKEKNFISDEKYKRLTGKDDFELRGFMARQLVNVRQTTKEVGKILQQIEPEIKIVYSKAEIASSFREMFDFIKVRELNDTHHAKDAYLNIVAGNVYNTKFTEKPYRYLQEIKENYDVKKIYNYDIKNAWDKENSLEIVKKNMEKNTVNITRFIKEEKGELFNLNPIKKGETSNEIISIKPKLYDGKDNKLNEKYGYYTSLKAAYFIYVEHEKKNKKVKTFERITRIDSTLIKNEKNLIKYLVSQKKLLNPKIIKKIYKEQTLIIDSYPYTFTGVDSNKKVELKNKKQLYLEKKYEQILKNALKFVEDNQGETEENYKFIYLKKRNNNEKNETIDAVKERYNIEFNEMYDKFLEKLSSKDYKNYINNKLYTNFLNSKEKFKKLKLWEKSLILREFLKIFNKNTYGKYEIKDSQTKEKLFSFPEDTGRIRLGQSSLGNNKELLEESVTGLFVKKIKL

SEQ ID NO: 13 - protein, 1084 aa, Corynebacterium diphtheriae
MKYHVGIDVGTFSVGLAAIEVDDAGMPIKTLSLVSHIHDSGLDPDEIKSAVTRLASSGIARRTRRLYRRKRRRLQQLDKFIQRQGWPVIELEDYSDPLYPWKVRAELAASYIADEKERGEKLSVALRHIARHRGWRNPYAKVSSLYLPDGPSDAFKAIREEIKRASGQPVPETATVGQMVTLCELGTLKLRGEGGVLSARLQQSDYAREIQEICRMQEIGQELYRKIIDVVFAAESPKGSASSRVGKDPLQPGKNRALKASDAFQRYRIAALIGNLRVRVDGEKRILSVEEKNLVFDHLVNLTPKKEPEWVTIAEILGIDRGQLIGTATMTDDGERAGARPPTHDTNRSIVNSRIAPLVDWWKTASALEQHAMVKALSNAEVDDFDSPEGAKVQAFFADLDDDVHAKLDSLHLPVGRAAYSEDTLVRLTRRMLSDGVDLYTARLQEFGIEPSWTPPTPRIGEPVGNPAVDRVLKTVSRWLESATKTWGAPERVIIEHVREGFVTEKRAREMDGDMRRRAARNAKLFQEMQEKLNVQGKPSRADLWRYQSVQRQNCQCAYCGSPITFSNSEMDHIVPRAGQGSTNTRENLVAVCHRCNQSKGNTPFAIWAKNTSIEGVSVKEAVERTRHWVTDTGMRSTDFKKFTKAVVERFQRATMDEEIDARSMESVAWMANELRSRVAQHFASHGTTVRVYRGSLTAEARRASGISGKLKFFDGVGKSRLDRRHHAIDAAVIAFTSDYVAETLAVRSNLKQSQAHRQEAPQWREFTGKDAEHRAAWRVWCQKMEKLSALLTEDLRDDRVVVMSNVRLRLGNGSAHKETIGKLSKVKLSSQLSVSDIDKASSEALWCALTREPGFDPKEGLPANPERHIRVNGTHVYAGDNIGLFPVSAGSIALRGGYAELGSSFHHARVYKITSGKKPAFAMLRVYTIDLLPYRNQDLFSVELKPQTMSMRQAEKKLRDALATGNAEYLGWLVVDDELVVDTSKIATDQVKAVEAELGTIRRWRVDGFFSPSKLRLRPLQMSKEGIKKESAPELSKIIDRPGWLPAVNKLFSDGNVTVVRRDSLGRVRLESTAHLPVTWKVQ

SEQ ID NO: 14 - protein, 1395 aa, Treponema denticola
MKKEIKDYFLGLDVGTGSVGWAVTDTDYKLLKANRKDLWGMRCFETAETAEVRRLHRGARRRIERRKKRIKLLQELFSQEIAKTDEGFFQRMKESPFYAEDKTILQENTLFNDKDFADKTYHKAYPTINHLIKAWIENKVKPDPRLLYLACHNIIKKRGHFLFEGDFDSENQFDTSIQALFEYLREDMEVDIDADSQKVKEILKDSSLKNSEKQSRLNKILGLKPSDKQKKAITNLISGNKINFADLYDNPDLKDAEKNSISFSKDDFDALSDDLASILGDSFELLLKAKAVYNCSVLSKVIGDEQYLSFAKVKIYEKHKTDLTKLKNVIKKHFPKDYKKVFGYNKNEKNNNNYSGYVGVCKTKSKKLIINNSVNQEDFYKFLKTILSAKSEIKEVNDILTEIETGTFLPKQISKSNAEIPYQLRKMELEKILSNAEKHFSFLKQKDEKGLSHSEKIIMLLTFKIPYYIGPINDNHKKFFPDRCWVVKKEKSPSGKTTPWNFFDHIDKEKTAEAFITSRTNFCTYLVGESVLPKSSLLYSEYTVLNEINNLQIIIDGKNICDIKLKQKIYEDLFKKYKKITQKQISTFIKHEGICNKTDEVIILGIDKECTSSLKSYIELKNIFGKQVDEISTKNMLEEIIRWATIYDEGEGKTILKTKIKAEYGKYCSDEQIKKILNLKFSGWGRLSRKFLETVTSEMPGFSEPVNIITAMRETQNNLMELLSSEFTFTENIKKINSGFEDAEKQFSYDGLVKPLFLSPSVKKMLWQTLKLVKEISHITQAPPKKIFIEMAKGAELEPARTKTRLKILQDLYNNCKNDADAFSSEIKDLSGKIENEDNLRLRSDKLYLYYTQLGKCMYCGKPIEIGHVFDTSNYDIDHIYPQSKIKDDSISNRVLVCSSCNKNKEDKYPLKSEIQSKQRGFWNFLQRNNFISLEKLNRLTRATPISDDETAKFIARQLVETRQATKVAAKVLEKMFPETKIVYSKAETVSMFRNKFDIVKCREINDFHHAHDAYLNIVVGNVYNTKFTNNPWNFIKEKRDNPKIADTYNYYKVFDYDVKRNNITAWEKGKTIITVKDMLKRNTPIYTRQAACKKGELFNQTIMKKGLGQHPLKKEGPFSNISKYGGYNKVSAAYYTLIEYEEKGNKIRSLETIPLYLVKDIQKDQDVLKSYLTDLLGKKEFKILVPKIKINSLLKINGFPCHITGKTNDSFLLRPAVQFCCSNNEVLYFKKIIRFSEIRSQREKIGKTISPYEDLSFRSYIKENLWKKTKNDEIGEKEFYDLLQKKNLEIYDMLLTKHKDTIYKKRPNSATIDILVKGKEKFKSLIIENQFEVILEILKLFSATRNVSDLQHIGGSKYSGVAKIGNKISSLDNCILIYQSITGIFEKRIDLLKV

SEQ ID NO: 15 - protein, 1334 aa, Listeria monocytogenes
MKNPYTIGLDIGTNSVGWAVLTNQYDLVKRKMKVAGNSDKKQIKKNFWGVRLFDDGQTAVDRRMNRTARRRIERRRNRISYLQEIFAVEMANIDANFFCRLNDSFYVDSEKRNSRHPFFATIEEEVAYHDNYRTIYHLREKLVNSSEKADLRLVYLALAHIIKYRGNFLIEGALDTKNTSVDEVYKQFIETYNQVFMSNIEEGALAKVEENIEVANILAGKFTRREKFERILQLYPGEKSTGMFAQFISLIVGSKGNFQKVFDLIEKTDIECAKDSYEEDLETLLAIIGDEYAELFVAAKNTYNAVVLSSIITVTDTETNAKLSASMIERFDAHEKDLVELKAFIKLNLPKQYEEIFSNAAIDGYAGYIDGKTKQVDFYKYLKTILENIEGSDYFIAKIEEENFLRKQRTFDNGAIPHQLHLEELEAIIHQQAKYYPFLKEDYDKIKSLVTFRIPYFVGPLANGQSEFAWLTRKADGEIRPWNIEEKVDFGKSAVDFIEKMTNKDTYLPKENVLPKHSLCYQKYMVYNELTKIRYIDDQGKTNYFSGREKQQVFNDLFKQKRKVKKKDLELFLRNINHIESPTIEGLEDSFNASYATYHDLLKVGMKQEILDNPLNTEMLEDIVKILTVFEDKPMIKEQLQQFSDVLDGGVLKKLERRHYTGWGRLSAKLLVGIREKQSHLTILDYLMNDDGLNRNLMQLINDSNLSFKSIIEKEQVSTTDKDLQSIVAELAGSPAIKKGILQSLKIVDELVSIMGYPPQTIVVEMARENQTTGKGKNNSKPRYKSLEKAIKEFGSQILKEHPTDNQELKNNRLYLYYLQNGKDMYTGQELDIHNLSNYDIDHIVPQSFITDNSIDNLVLTSSAGNREKGGDVPPLEIVRKRKVFWEKLYQGNLMSKRKFDYLTKAERGGLTEADKARFIHRQLVETRQITKNVANILYQRFNKETDNHGNTMEQVRIVTLKSALVSQFRKQFQLYKVREVNGYHHAHDAYLNGVVANTLLKVYPQLEPEFVYGEYHQFDWFKANKATAKKQFYTNIMLFFAQKERIIDENGEILWDKKYLETIKKVLDYRQMNIVKKTEIQKGEFSKATIKPKGNSSKLIPRKENWDPMKYGGLDSPNMAYAVIIEHAKGKKKIVIEKKLIQINIMERKMFEKDEEAFLEEKGYRHPKVLTKLPKYTLYECEKGRRRMLASANEAQKGNQLVLSNHLVSLLYHAKNCEASDGKSLKYIEAHRETFSELLAQVSEFATRYTLADANLSKINNLFEQNKEGDIKAIAQSFVDLMAFNAMGAPASFKFFEATIDRKRYTNLKELLSSTIIYQSITGLYESRKRLDD

SEQ ID NO: 16 - protein, 1236 aa, Mycoplasma mobile
MYFYKNKENKLNKKVVLGLDLGIASVGWCLTDISQKEDNKFPIILHGVRLFETVDDSDDKLLNETRRKKRGQRRRNRRLFTRKRDFIKYLIDNNIIELEFDKNPKILVRNFIEKYINPFSKNLELKYKSVTNLPIGFHNLRKAAINEKYKLDKSELIVLLYFYLSLRGAFFDNPEDTKSKEMNKNEIEIFDKNESIKNAEFPIDKIIEFYKISGKIRSTINLKFGHQDYLKEIKQVFEKQNIDFMNYEKFAMEEKSFFSRIRNYSEGPGNEKSFSKYGLYANENGNPELIINEKGQKIYTKIFKTLWESKIGKCSYDKKLYRAPKNSFSAKVFDITNKLTDWKHKNEYISERLKRKILLSRFLNKDSKSAVEKILKEENIKFENLSEIAYNKDDNKINLPIINAYHSLTTIFKKHLINFENYLISNENDLSKLMSFYKQQSEKLFVPNEKGSYEINQNNNVLHIFDAISNILNKFSTIQDRIRILEGYFEFSNLKKDVKSSEIYSEIAKLREFSGTSSLSFGAYYKFIPNLISEGSKNYSTISYEEKALQNQKNNFSHSNLFEKTWVEDLIASPTVKRSLRQTMNLLKEIFKYSEKNNLEIEKIVVEVTRSSNNKHERKKIEGINKYRKEKYEELKKVYDLPNENTTLLKKLWLLRQQQGYDAYSLRKIEANDVINKPWNYDIDHIVPRSISFDDSFSNLVIVNKLDNAKKSNDLSAKQFIEKIYGIEKLKEAKENWGNWYLRNANGKAFNDKGKFIKLYTIDNLDEFDNSDFINRNLSDTSYITNALVNHLTFSNSKYKYSVVSVNGKQTSNLRNQIAFVGIKNNKETEREWKRPEGFKSINSNDFLIREEGKNDVKDDVLIKDRSFNGHHAEDAYFITIISQYFRSFKRIERLNVNYRKETRELDDLEKNNIKFKEKASFDNFLLINALDELNEKLNQMRFSRMVITKKNTQLFNETLYSGKYDKGKNTIKKVEKLNLLDNRTDKIKKIEEFFDEDKLKENELTKLHIFNHDKNLYETLKIIWNEVKIEIKNKNLNEKNYFKYFVNKKLQEGKISFNEWVPILDNDFKIIRKIRYIKFSSEEKETDEIIFSQSNFLKIDQRQNFSFHNTLYWVQIWVYKNQKDQYCFISIDARNSKFEKDEIKINYEKLKTQKEKLQIINEEPILKINKGDLFENEEKELFYIVGRDEKPQKLEIKYILGKKIKDQKQIQKPVKKYFPNWKKVNLTYMGEIFKK

SEQ ID NO: 17 - protein, 1372 aa, Legionella pneumophila
MESSQILSPIGIDLGGKFTGVCLSHLEAFAELPNHANTKYSVILIDHNNFQLSQAQRRATRHRVRNKKRNQFVKRVALQLFQHILSRDLNAKEETALCHYLNNRGYTYVDTDLDEYIKDETTINLLKELLPSESEHNFIDWFLQKMQSSEFRKILVSKVEEKKDDKELKNAVKNIKNFITGFEKNSVEGHRHRKVYFENIKSDITKDNQLDSIKKKIPSVCLSNLLGHLSNLQWKNLHRYLAKNPKQFDEQTFGNEFLRMLKNFRHLKGSQESLAVRNLIQQLEQSQDYISILEKTPPEITIPPYEARTNTGMEKDQSLLLNPEKLNNLYPNWRNLIPGIIDAHPFLEKDLEHTKLRDRKRIISPSKQDEKRDSYILQRYLDLNKKIDKFKIKKQLSFLGQGKQLPANLIETQKEMETHFNSSLVSVLIQIASAYNKEREDAAQGIWFDNAFSLCELSNINPPRKQKILPLLVGAILSEDFINNKDKWAKFKIFWNTHKIGRTSLKSKCKEIEEARKNSGNAFKIDYEEALNHPEHSNNKALIKIIQTIPDIIQAIQSHLGHNDSQALIYHNPFSLSQLYTILETKRDGFHKNCVAVTCENYWRSQKTEIDPEISYASRLPADSVRPFDGVLARMMQRLAYEIAMAKWEQIKHIPDNSSLLIPIYLEQNRFEFEESFKKIKGSSSDKTLEQAIEKQNIQWEEKFQRIINASMNICPYKGASIGGQGEIDHIYPRSLSKKHFGVIFNSEVNLIYCSSQGNREKKEEHYLLEHLSPLYLKHQFGTDNVSDIKNFISQNVANIKKYISFHLLTPEQQKAARHALFLDYDDEAFKTITKFLMSQQKARVNGTQKFLGKQIMEFLSTLADSKQLQLEFSIKQITAEEVHDHRELLSKQEPKLVKSRQQSFPSHAIDATLTMSIGLKEFPQFSQELDNSWFINHLMPDEVHLNPVRSKEKYNKPNISSTPLFKDSLYAERFIPVWVKGETFAIGFSEKDLFEIKPSNKEKLFTLLKTYSTKNPGESLQELQAKSKAKWLYFPINKTLALEFLHHYFHKEIVTPDDTTVCHFINSLRYYTKKESITVKILKEPMPVLSVKFESSKKNVLGSFKHTIALPATKDWERLFNHPNFLALKANPAPNPKEFNEFIRKYFLSDNNPNSDIPNNGHNIKPQKHKAVRKVFSLPVIPGNAGTMMRIRRKDNKGQPLYQLQTIDDTPSMGIQINEDRLVKQEVLMDAYKTRNLSTIDGINNSEGQAYATFDNWLTLPVSTFKPEIIKLEMKPHSKTRRYIRITQSLADFIKTIDEALMIKPSDSIDDPLNMPNEIVCKNKLFGNELKPRDGKMKIVSTGKIVTYEFESDSTPQWIQTLYVTQLKKQP

SEQ ID NO: 18 - protein, 1122 aa, Streptococcus thermophilus
MSDLVLGLDIGIGSVGVGILNKVTGEIIHKNSRIFPAAQAENNLVRRTNRQGRRLTRRKKHRIVRLNRLFEESGLITDFTKISINLNPYQLRVKGLTDELSNEELFIALKNMVKHRGISYLDDASDDGNSSVGDYAQIVKENSKQLETKTPGQIQLERYQTYGQLRGDFTVEKDGKKHRLINVFPTSAYRSEALRILQTQQEFNSQITDEFINRYLEILTGKRKYYHGPGNEKSRTDYGRYRTNGETLDNIFGILIGKCTFYPDEFRAAKASYTAQEFNLLNDLNNLTVPTETKKLSKEQKNQIINYVKNEKVMGPAKLFKYIAKLLSCDVADIKGHRIDKSGKAEIHTFEAYRKMKTLETLDIEQMDRETLDKLAYVLTLNTEREGIQEALEHEFADGSFSQKQVDELVQFRKANSSIFGKGWHNFSVKLMMELIPELYETSEEQMTILTRLGKQKTTSSSNKTKYIDEKLLTEEIYNPVVAKSVRQAIKIVNAAIKEYGDFDNIVIEMARETNEDDEKKAIQKIQKANKDEKDAAMLKAANQYNGKAELPHSVFHGHKQLATKIRLWHQQGERCLYTGKTISIHDLINNPNQFEVDHILPLSITFDDSLANKVLVYATANQEKGQRTPYQALDSMDDAWSFRELKAFVRESKTLSNKKKEYLLTEEDISKFDVRKKFIERNLVDTRYASRVVLNALQEHFRAHKIDTKVSVVRGQFTSQLRRHWGIEKTRDTYHHHAVDALIIAASSQLNLWKKQKNTLVSYSEEQLLDIETGELISDDEYKESVFKAPYQHFVDTLKSKEFEDSILFSYQVDSKFNRKISDATIYATRQAKVGKDKKDETYVLGKIKDIYTQDGYDAFMKIYKKDKSKFLMYRHDPQTFEKVIEPILENYPNKEMNEKGKEVPCNPFLKYKEEHGYIRKYSKKGNGPEIKSLKYYDSKLLGNPIDITPENSKNKVVLQSLKPWRTDVYFNKNTGKYEILGLKYADLQFEKKTGTYKISQEKYNGIMKEEGVDSDSEFKFTLYKNDLLLVKDTETKEQQLFRFLSRTMPNVKYYVELKPYSKDKFEKNESLIEILGSADKSGRCIKGLGKSNISIYKVRTDVLGNQHIIKNEGDKPKLDF

SEQ ID NO: 19 - protein, 1128 aa, Streptococcus thermophilus
MSDLVLGLDIGIGSVGVGILNKVTGEIIHKNSRIFPAAQAENNLVRRTNRQGRRLTRRKKHRIVRLNRLFEESGLITDFTKISINLNPYQLRVKGLTDELSNEELFIALKNMVKHRGISYLDDASDDGNSSVGDYAQIVKENSKQLETKTPGQIQLERYQTYGQLRGDFTVEKDGKKHRLINVFPTSAYRSEALRILQTQQEFNPQITDEFINRYLEILTGKRKYYHGPGNEKSRTDYGRYRTSGETLDNIFGILIGKCTFYPEEFRAAKASYTAQEFNLLNDLNNLTVPTETKKLSKEQKNQIINYVKNEKAMGPAKLFKYIAKLLSCDVADIKGYRIDKSGKAEIHTFEAYRKMKTLETLDIEQMDRETLDKLAYVLTLNTEREGIQEALEHEFADGSFSQKQVDELVQFRKANSSIFGKGWHNFSVKLMMELIPELYETSEEQMTILTRLGKQKRLRLQIKQNISNKTKYIDEKLLTEEIYNPVVAKSVRQAIKIVNAAIKEYGDFDNIVIEMARETNEDDEKKAIQKIQKANKDEKDAAMLKAANQYNGKAELPHSVFHGHKQLATKIRLWHQQGERCLYTGKTISIHDLINNPNQFEVDHILPLSITFDDSLANKVLVYATANQEKGQRTPYQALDSMDDAWSFRELKAFVRESKTLSNKKKEYLLTEEDISKFDVRKKFIERNLVDTRYASRVVLNALQEHFRAHKIDTKVSVVRGQFTSQLRRHWGIEKTRDTYHHHAVDALIIAASSQLNLWKKQKNTLVSYSEEQLLDIETGELISDDEYKESVFKAPYQHFVDTLKSKEFEDSILFSYQVDSKFNRKISDATIYATRQAKVGKDKKDETYVLGKIKDIYTQDGYDAFMKIYKKDKSKFLMYRHDPQTFEKVIEPILENYPNKQMNEKGKEVPCNPFLKYKEEHGYIRKYSKKGNGPEIKSLKYYDSKLLGNPIDITPENSKNKVVLQSLKPWRTDVYFNKATGKYEILGLKYADLQFEKGTGTYKISQEKYNDIKKKEGVDSDSEFKFTLYKNDLLLVKDTETKEQQLFRFLSRTLPKQKHYVELKPYDKQKFEGGEALIKVLGNVANGGQCIKGLAKSNISIYKVRTDVLGNQHIIKNEGDKPKLDF

SEQ ID NO: 20 - protein, 1123 aa, Francisella tularensis
MNVKILPIAIDLDVKNTGVFSAFYQKGTSLEKLDNKNGKVYELSKDSYTLLMNNRTARRHKRRGIDRKQLVKRLFKLVWTEQLNLEWDKDTQQAISFLFNRRGFSFITDGYSTEYLNIVPEQVKAILMDIFDDYNGEDDLDSYLKLATEQESKISEIYNKLMQKILEFKLRKLCTDIKDDKVSTKTLKEITSYEFELLADYLANYSESLKTQKFSYTDKQGNLKELSYYHHDKYNIQEFLKRHATINDEILGTLLTDDFDIWNFNFEKFDFDKNEEKLQNQEDKDHTQAHLHHFVFVVNKIKSEMASGGRHRSQYFQEITNVLDENNHQEGYLKNFCENLHNKKYSNLSVKNLVNLVGNLSNLELKPLRKYFNDKIHAKADHWDEQKFTETYCHWILGEWRVGVKDQDKKDGAKYSYKDLCNELKQKVTKAGLIDFLLELDPCRTIPPYLDNNNRKPPKCQSLILNPKFLDNQYPNWQQYLQELKKLQSIQDYLDSFETDLKDLKSSKDQPYFVEYKSSNQQMASGQRDYKDLDARILQFIFDRVKASDELLLNEIYFQAKKLKQKASSELEKLESSKKLDEVIANSQLSQILKSQHTNGIFEQGTFLHLVCKYYKQRQRARDSRLYIMPEYRYDKKLDKYNNTGRFDDNNQLLTYCNHKPRQKRYQLLNDLAGVLQVSRNQLLSSVEEWFQQAQRVGEISKSQDEQIFEWLKSFKIASYCKAAVEMQKQYRGTLKNAIQTAIFRQSENINKNKNTGNQQQALSENSKDVKSLTADEKKLLKLIENIAKASQKIGESLGLNDKQIKKFNSIYSFAQIQQIAFAKRKGNANTCAVCSADNAHRMQQIKITELVEDNKDNIILSAKAQRLPAIPTRIVDGAVKKMATILAKNIVDDNWQNIKQVLSAKHQLHIPIITESNAFEFEPALADVKGKSLKDRRKKALERISPENIFKDKNNRIKEFAKGISAYSGANLTDGDFDGAKEELDHIIPRSHKKYGTLNDEANLICVTRDDNKNIFAIDTSKWFEIETPSDLRDIGVATIQYKIDNNSRPKVRVKLDYVIDDDSKINYFMNHSLLKSRYPDKVLEILKQSTIIEFESSGFNKTIKEMLGMTLAGIYNETSNN

SEQ ID NO: 21 - protein, 1436 aa, Bacteroides fragilis
MKRILGLDLGTNSIGWALVNEAENKDERSSIVKLGVRVNPLTVDELTNFEKGKSITTNADRTLKRGMRRNLQRYKLRRETLTEVLKEHKLITEDTILSENGNRTTFETYRLRAKAVTEEISLEEFARVLLMINKKRGYKSSRKAKGVEEGTLIDGMDIARELYNNNLTPGELCLQLLDAGKKFLPDFYRSDLQNELDRIWEKQKEYYPEILTDVLKEELRGKKRDAVWAICAKYFVWKENYTEWNKEKGKTEQQEREHKLEGIYSKRKRDEAKRENLQWRVNGLKEKLSLEQLVIVFQEMNTQINNSSGYLGAISDRSKELYFNKQTVGQYQMEMLDKNPNASLRNMVFYRQDYLDEFNMLWEKQAVYHKELTEELKKEIRDIIIFYQRRLKSQKGLIGFCEFESRQIEVDIDGKKKIKTVGNRVISRSSPLFQEFKIWQILNNIEVTVVGKKRKRRKLKENYSALFEELNDAEQLELNGSRRLCQEEKELLAQELFIRDKMTKSEVLKLLFDNPQELDLNFKTIDGNKTGYALFQAYSKMIEMSGHEPVDFKKPVEKVVEYIKAVFDLLNWNTDILGFNSNEELDNQPYYKLWHLLYSFEGDNTPTGNGRLIQKMTELYGFEKEYATILANVSFQDDYGSLSAKAIHKILPHLKEGNRYDVACVYAGYRHSESSLTREEIANKVLKDRLMLLPKNSLHNPVVEKILNQMVNVINVIIDIYGKPDEIRVELARELKKNAKEREELTKSIAQTTKAHEEYKTLLQTEFGLTNVSRTDILRYKLYKELESCGYKTLYSNTYISREKLFSKEFDIEHIIPQARLFDDSFSNKTLEARSVNIEKGNKTAYDFVKEKFGESGADNSLEHYLNNIEDLFKSGKISKTKYNKLKMAEQDIPDGFIERDLRNTQYIAKKALSMLNEISHRVVATSGSVTDKLREDWQLIDVMKELNWEKYKALGLVEYFEDRDGRQIGRIKDWTKRNDHRHHAMDALTVAFTKDVFIQYFNNKNASLDPNANEHAIKNKYFQNGRAIAPMPLREFRAEAKKHLENTLISIKAKNKVITGNINKTRKKGGVNKNMQQTPRGQLHLETIYGSGKQYLTKEEKVNASFDMRKIGTVSKSAYRDALLKRLYENDNDPKKAFAGKNSLDKQPIWLDKEQMRKVPEKVKIVTLEAIYTIRKEISPDLKVDKVIDVGVRKILIDRLNEYGNDAKKAFSNLDKNPIWLNKEKGISIKRVTISGISNAQSLHVKKDKDGKPILDENGRNIPVDFVNTGNNHHVAVYYRPVIDKRGQLVVDEAGNPKYELEEVVVSFFEAVTRANLGLPIIDKDYKTTEGWQFLFSMKQNEYFVFPNEKTGFNPKEIDLLDVENYGLISPNLFRVQKFSLKNYVFRHHLETTIKDTSSILRGITWIDFRSSKGLDTIVKVRVNHIGQIVSVGEY

SEQ ID NO: 22 - protein, 1314 aa, Mycoplasma synoviae
MLRLYCANNLVLNNVQNLWKYLLLLIFDKKIIFLFKIKVILIRRYMENNNKEKIVIGFDLGVASVGWSIVNAETKEVIDLGVRLFSEPEKADYRRAKRTTRRLLRRKKFKREKFHKLILKNAEIFGLQSRNEILNVYKDQSSKYRNILKLKINALKEEIKPSELVWILRDYLQNRGYFYKNEKLTDEFVSNSFPSKKLHEHYEKYGFFRGSVKLDNKLDNKKDKAKEKDEEEESDAKKESEELIFSNKQWINEIVKVFENQSYLTESFKEEYLKLFNYVRPFNKGPGSKNSRTAYGVFSTDIDPETNKFKDYSNIWDKTIGKCSLFEEEIRAPKNLPSALIFNLQNEICTIKNEFTEFKNWWLNAEQKSEILKFVFTELFNWKDKKYSDKKFNKNLQDKIKKYLLNFALENFNLNEEILKNRDLENDTVLGLKGVKYYEKSNATADAALEFSSLKPLYVFIKFLKEKKLDLNYLLGLENTEILYFLDSIYLAISYSSDLKERNEWFKKLLKELYPKIKNNNLEIIENVEDIFEITDQEKFESFSKTHSLSREAFNHIIPLLLSNNEGKNYESLKHSNEELKKRTEKAELKAQQNQKYLKDNFLKEALVPLSVKTSVLQAIKIFNQIIKNFGKKYEISQVVIEMARELTKPNLEKLLNNATNSNIKILKEKLDQTEKFDDFTKKKFIDKIENSVVFRNKLFLWFEQDRKDPYTQLDIKINEIEDETEIDHVIPYSKSADDSWFNKLLVKKSTNQLKKNKTVWEYYQNESDPEAKWNKFVAWAKRIYLVQKSDKESKDNSEKNSIFKNKKPNLKFKNITKKLFDPYKDLGFLARNLNDTRYATKVFRDQLNNYSKHHSKDDENKLFKVVCMNGSITSFLRKSMWRKNEEQVYRFNFWKKDRDQFFHHAVDASIIAIFSLLTKTLYNKLRVYESYDVQRREDGVYLINKETGEVKKADKDYWKDQHNFLKIRENAIEIKNVLNNVDFQNQVRYSRKANTKLNTQLFNETLYGVKEFENNFYKLEKVNLFSRKDLRKFILEDLNEESEKNKKNENGSRKRILTEKYIVDEILQILENEEFKDSKSDINALNKYMDSLPSKFSEFFSQDFINKCKKENSLILTFDAIKHNDPKKVIKIKNLKFFREDATLKNKQAVHKDSKNQIKSFYESYKCVGFIWLKNKNDLEESIFVPINSRVIHFGDKDKDIFDFDSYNKEKLLNEINLKRPENKKFNSINEIEFVKFVKPGALLLNFENQQIYYISTLESSSLRAKIKLLNKMDKGKAVSMKKITNPDEYKIIEHVNPLGINLNWTKKLENNN

SEQ ID NO: 23 - protein, 1368 aa, Streptococcus pyogenes
MDKKYSIGLDIGTNSVGWAVITDDYKVPSKKFKVLGNTDRHSIKKNLIGALLFDSGETAEATRLKRTARRRYTRRKNRICYLQEIFSNEMAKVDDSFFHRLEESFLVEEDKKHERHPIFGNIVDEVAYHEKYPTIYHLRKKLVDSTDKADLRLIYLALAHMIKFRGHFLIEGDLNPDNSDVDKLFIQLVQTYNQLFEENPINASGVDAKAILSARLSKSRRLENLIAQLPGEKKNGLFGNLIALSLGLTPNFKSNFDLAEDAKLQLSKDTYDDDLDNLLAQIGDQYADLFLAAKNLSDAILLSDILRLNSEITKAPLSASMIKRYDEHHQDLTLLKALVRQQLPEKYKEIFFDQSKNGYAGYIDGGASQEEFYKFIKPILEKMDGTEELLAKLNREDLLRKQRTFDNGSIPHQIHLGELHAILRRQEDFYPFLKDNREKIEKILTFRIPYYVGPLARGNSRFAWMTRKSEETITPWNFEEVVDKGASAQSFIERMTNFDKNLPNEKVLPKHSLLYEYFTVYNELTKVKYVTEGMRKPAFLSGEQKKAIVDLLFKTNRKVTVKQLKEDYFKKIECFDSVEISGVEDRFNASLGTYHDLLKIIKDKDFLDNEENEDILEDIVLTLTLFEDREMIEERLKTYAHLFDDKVMKQLKRRRYTGWGRLSRKLINGIRDKQSGKTILDFLKSDGFANRNFMQLIHDDSLTFKEDIQKAQVSGQGDSLHEHIANLAGSPAIKKGILQTVKVVDELVKVMGRHKPENIVIEMARENQTTQKGQKNSRERMKRIEEGIKELGSQILKEHPVENTQLQNEKLYLYYLQNGRDMYVDQELDINRLSDYDVDHIVPQSFIKDDSIDNKVLTRSDKNRGKSNNVPSEEVVKKMKNYWRQLLNAKLITQRKFDNLTKAERGGLSELDKAGFIKRQLVETRQITKHVAQILDSRMNTKYDENDKLIREVKVITLKSKLVSDFRKDFQFYKVREINNYHHAHDAYLNAVVGTALIKKYPKLESEFVYGDYKVYDVRKMIAKSEQEIGKATAKYFFYSNIMNFFKTEITLANGEIRKRPLIETNGETGEIVWDKGRDFATVRKVLSMPQVNIVKKTEVQTGGFSKESILPKRNSDKLIARKKDWDPKKYGGFDSPTVAYSVLVVAKVEKGKSKKLKSVKELLGITIMERSSFEKNPIDFLEAKGYKEVRKDLIVKLPKYSLFELENGRKRMLASAGELQKGNELALPSKYVNFLYLASHYEKLKGSPEDNEQKQLFVEQHKHYLDEIIEQISEFSKRVILADANLDKVLSAYNKHRDKPIREQAENIIHLFTLTNLGAPAAFKYFDTTIDRKRYTSTKEVLDATFIHQSITGLYETRIDLSQLGGD

SEQ ID NO: 24 - protein, 1368 aa, Streptococcus pyogenes
MDKKYSIGLDIGTNSVGWAVITDDYKVPSKKFKVLGNTDRHSIKKNLIGALLFDSGETAEATRLKRTARRRYTRRKNRICYLQEIFSNEMAKVDDSFFHRLEESFLVEEDKKHERHPIFGNIVDEVAYHEKYPTIYHLRKKLVDSTDKADLRLIYLALAHMIKFRGHFLIEGDLNPDNSDVDKLFIQLVQTYNQLFEENPINASGVDAKAILSARLSKSRRLENLIAQLPGEKKNGLFGNLIALSLGLTPNFKSNFDLAEDAKLQLSKDTYDDDLDNLLAQIGDQYADLFLAAKNLSDAILLSDILRVNTEITKAPLSASMIKRYDEHHQDLTLLKALVRQQLPEKYKEIFFDQSKNGYAGYIDGGASQEEFYKFIKPILEKMDGTEELLVKLNREDLLRKQRTFDNGSIPHQIHLGELHAILRRQEDFYPFLKDNREKIEKILTFRIPYYVGPLARGNSRFAWMTRKSEETITPWNFEEVVDKGASAQSFIERMTNFDKNLPNEKVLPKHSLLYEYFTVYNELTKVKYVTEGMRKPAFLSGEQKKAIVDLLFKTNRKVTVKQLKEDYFKKIECFDSVEISGVEDRFNASLGTYHDLLKIIKDKDFLDNEENEDILEDIVLTLTLFEDREMIEERLKTYAHLFDDKVMKQLKRRRYTGWGRLSRKLINGIRDKQSGKTILDFLKSDGFANRNFMQLIHDDSLTFKEDIQKAQVSGQGDSLHEHIANLAGSPAIKKGILQTVKVVDELVKVMGRHKPENIVIEMARENQTTQKGQKNSRERMKRIEEGIKELGSQILKEHPVENTQLQNEKLYLYYLQNGRDMYVDQELDINRLSDYDVDHIVPQSFLKDDSIDNKVLTRSDKNRGKSDNVPSEEVVKKMKNYWRQLLNAKLITQRKFDNLTKAERGGLSELDKAGFIKRQLVETRQITKHVAQILDSRMNTKYDENDKLIREVKVITLKSKLVSDFRKDFQFYKVREINNYHHAHDAYLNAVVGTALIKKYPKLESEFVYGDYKVYDVRKMIAKSEQEIGKATAKYFFYSNIMNFFKTEITLANGEIRKRPLIETNGETGEIVWDKGRDFATVRKVLSMPQVNIVKKTEVQTGGFSKESILPKRNSDKLIARKKDWDPKKYGGFDSPTVAYSVLVVAKVEKGKSKKLKSVKELLGITIMERSSFEKNPIDFLEAKGYKEVKKDLIIKLPKYSLFELENGRKRMLASAGELQKGNELALPSKYVNFLYLASHYEKLKGSPEDNEQKQLFVEQHKHYLDEIIEQISEFSKRVILADANLDKVLSAYNKHRDKPIREQAENIIHLFTLTNLGAPAAFKYFDTTIDRKRYTSTKEVLDATLIHQSITGLYETRIDLSQLGGD

SEQ ID NO: 25 - protein, 1370 aa, Streptococcus agalactiae; identical to SEQ ID NO: 5

SEQ ID NO: 26 - protein, 1173 aa, Rhodospirillum rubrum
MRPIEPWILGLDIGTDSLGWAVFSCEEKGPPTAKELLGGGVRLFDSGRDAKDHTSRQAERGAFRRARRQTRTWPWRRDRLIALFQAAGLTPPAAETRQIALALRREAVSRPLAPDALWAALLHLAHHRGFRSNRIDKRERAAAKALAKAKPAKATAKATAPAKEADDEAGFWEGAEAALRQRMAASGAPTVGALLADDLDRGQPVRMRYNQSDRDGVVAPTRALIAEELAEIVARQSSAYPGLDWPAVTRLVLDQRPLRSKGAGPCAFLPGEDRALRALPTVQDFIIRQTLANLRLPSTSADEPRPLTDEEHAKALALLSTARFVEWPALRRALGLKRGVKFTAETERNGAKQAARGTAGNLTEAILAPLIPGWSGWDLDRKDRVFSDLWAARQDRSALLALIGDPRGPTRVTEDETAEAVADAIQIVLPTGRASLSAKAARAIAQAMAPGIGYDEAVTLALGLHHSHRPRQERLARLPYYAAALPDVGLDGDPVGPPPAEDDGAAAEAYYGRIGNISVHIALNETRKIVNALLHRHGPILRLVMVETTRELKAGADERKRMIAEQAERERENAEIDVELRKSDRWMANARERRQRVRLARRQNNLCPYTSTPIGHADLLGDAYDIDHVIPLARGGRDSLDNMVLCQSDANKTKGDKTPWEAFHDKPGWIAQRDDFLARLDPQTAKALAWRFADDAGERVARKSAEDEDQGFLPRQLTDTGYIARVALRYLSLVTNEPNAVVATNGRLTGLLRLAWDITPGPAPRDLLPTPRDALRDDTAARRFLDGLTPPPLAKAVEGAVQARLAALGRSRVADAGLADALGLTLASLGGGGKNRADHRHHFIDAAMIAVTTRGLINQINQASGAGRILDLRKWPRTNFEPPYPTFRAEVMKQWDHIHPSIRPAHRDGGSLHAATVFGVRNRPDARVLVQRKPVEKLFLDANAKPLPADKIAEIIDGFASPRMAKRFKALLARYQAAHPEVPPALAALAVARDPAFGPRGMTANTVIAGRSDGDGEDAGLITPFRANPKAAVRTMGNAVYEVWEIQVKGRPRWTHRVLTRFDRTQPAPPPPPENARLVMRLRRGDLVYWPLESGDRLFLVKKMAVDGRLALWPARLATGKATALYAQLSCPNINLNGDQGYCVQSAEGIRKEKIRTTSCTALGRLRLSKKAT

SEQ ID NO: 27 - protein, 997 aa, Maritimibacter alkaliphilus
MKVLVDAGLMPSDPAAAKALETLDPYELRATGLDVMLPLTHLGRAVFHLNQRRGFKSNRKTDRGDNESGKIKDATKRLTWAMQEAGARTYGEFLHMRRARASDPRQVPSVRTRLSVASRGGPDSKEEAGYDFYPERAHLEDEFHALWSAQAAFHPDLTCELRDVVFEKIFYQRPLKEPKVGLCLFTAEERLPKAHPLTGRRVLYETVNQLRVTADGRTTRPLTLEERDMIVYALDNKKPVKSLSSMHLKLVALGKLVKLKDGERFTLESGVRDAIACDPIRATMGHPDGFGPAWSRLDWQAQWALIEKLRQVQSDDDFASLVAWLGATHNLSEDHAKRVANLHLPEGYGRLGLTATEAILCNLKAEVCTYSQAVERWGKHHSNQRTGECLEALPYYGEVLDRHVIPGTYNEDDDDVTRYGRITNPTVHIGLNQLRRLVNRIIATYGKPDQIVVELARELKQSEAQKSEALKKIRDTTADAIRRGRQLEEIGQKNTGANRLLLRLWEDLGPAVGPRCCPYTGKPISVTMLFDGACDVDHILPYSRTLDDSFANRTICLREANRQKGDRTPWEAWGGSDQWDAIEANLKDLPENKRKRFAPDAMERFEGERDFLDRALVDTQYLARISRAYLDTLFTEGGHVWVVPGRMTEMLRRHWGLNALLSDKDRGAGKVKNRTDHRHHAIDAAVIAATDHSLVNRISKAAGQGESAGQSAELIARDTPEPWEGFRNDISAQIARIVVSHRADHGRIDVEGRKHGKDSTAGRLHNDTAYGIVDDHTVVSRTPLLSLKPGDIEVTTKGKNIRDTQLQKALSVATTGKDGKGFEEALRNFAEKEGPYQGIRRVRLIETLQSSARVEVGSDEDGQPLKAYKGDSNHCYDLWKLPDGKVVPHVVSTYEAHAGTDKRPHPAAKRILRVFKKDMVAIEQDDQTAIFYVQKLDRANGLFLAPHLEANADARHRNPNDAFKFLQMGAGSVVRNKLRRVYVDEIGRIKDPGPPKH

SEQ ID NO: 28 - protein, 1027 aa, Blastopirellula marina
MFSESGDQPSLVDCGVRIFPEGVERDQQGGEKSKSQSRRVARGIRRQVRRRAQRLRHLKHALITTGLFPADVVDQQEVLASNPYELRSRALSEKLEPYEIGRILLHLAKRRGFLSNRTTDRSGGNELKGILAEMTQLQGEIAAHGCQTLGQYLHQLGDDGETFAQRLRGRHTLRAMYEDEFEKIWERQASYYPALLTEELRGGEEGKQSYPLVPTARRKSESLLKRFGLHGLLFFQRKMYWPKSVIGRCDLEPKEKRCPKADRLAQRFRILQEVNNLRLISPADRKEYTFAEFVGAGADKKLVDYLCEAKERTFPQIRKKFKLPETISFNYERGERSKLQGHETDAHFNGKKGLGKRRWSEIAEDVKDHIIQIVLEEDREDVALRKLTQDCSLTVEEAHKAMALHLPAGYSQYSRVAISRLLPHLELGKLLMGNDASDSAMHAAGYLRPDEREVRQYDLLPEPPDIPNPLVRQALYEVRKVINAIIREYGALGTIRVELAREAKKSAEQRTQIRIANAKRERENAAIAKTLQEMSPAIRPTRRNIQRYLLWKDQGGVCIYTGKVISQAQLFDSGEVDVDHILPRWRSLDDSMANKVIAHRSANNEKGDRTPWEWLGHDKPRFDELLLRAQRLPYGKRQRFIQKEVELTNFVERQLRDTTYVSRLVVQYLKGLGVPITTVKGPMTAELRHHWGLNALLNEDGSQKKNRSDHRHHAIDAIVIGLTDAKRLHALANARGKDLQPPWSEFRSDVATALGRMAVSHRVRRRIQGALHEETIYGPTQKAAQPTSTDQRPWAKDWIEDSQIVVRRKSVSDLTNTKHLAKIRDVTIRKILEDHLRRQKVDPTKPGVIPKDAFAGSNAPQMPSGVPIKKVRLVERGETWRKIGSGEASKFIKPGSNHHISYFAISRKGRESWKAHVTIMLDAACIAKESINNGKIVNRSIGDQGRFLMSLSIGEMFEITNNGGEILLCVVRKIDQSGRIYYKIHDDARESMDLKKDNLYMSPSKMQQFDARKVTVTPLGKIRNAND

SEQ ID NO: 29 - protein, 158 aa, Francisella tularensis
MIDFLLELDPCITIPPYLDNNNRKPPKCQSLILNPKFLDNQYPNWQQYLQELKKLQSIQDYLDSFETDLKDLKSSKDQPYFVEYKSSNQQMASGQRDYKDLDARILQFIFDRVKASDELLLSEIYFQAKKLKQKASSELEKLESSKKLDEVIANSQLS

SEQ ID NO: 30 - protein, 393 aa, Francisella tularensis
MNVKILPIAIDLDVKNTGVFSAFYQKGTSLEKLDNKNGKVYELSKDSYTLLMNNRTAQRHQRRGIDRKQLVKRLFKLVWTEQLNLEWDKDTQQAISFLFNRRGFSFITDGYSTEYLNIVPEQVKAILMDIFDDYNGEDDLDSYLKLATEQESKISEIYNKLMQKILEFKLRKLCTDIKDDKVSTKTLKEITSYEFELLADYLANYSESLKTQKFSYTDKQGNLKELSYYHHDKYNIQEFLKRHATINDEILDTLLTDDFDIWNFNFEKFDFDKNEEKLQSQEDKDHTQAYFHHFVFAVNKIKSEMASGGRHRSQYFQEITNVLDENNHQEGYLKNFCENLHNKKYSNLSVKNLVNLVGNLSNLELKPLRKYFNDKNLIIGMSKSLQKLIATGY

SEQ ID NO: 31 - protein, 1066 aa, Rhodopseudomonas palustris
MSERVVRRILGIDLGIASCGWGVVDISGAGGGIIATGVRCFDAPLIDKTGEPKSATRRTARGQRRIVRRRRQRMNGVRRLLCEFGLLPDPRPDALNQAMRRISTASAAAQVTPWTLRAAAHQRLLSNEELAVVLGHIARHRGFRSNAKNEAGANAADETSKMKKAMEATREGLAKYHAFGDMIANDPKFANRKRNRDKDYSHTAKRSDLEDEVRAILRAQLRFGSAAATETLAQTFADVAFFQRPLQDSEDRVGDCPFEPGQKRAARRAPSFELFRFLSRLANLKLAVGRSPERRLTAEEIALAAKGFGETKKTITFKSLREALDLDPNARFSGIGKDKEASLDVVARTGGAAYGTKTLKDALGDAPWRSLSRTPETLDRIAEILSFREDITSIRNGLEDLGLDSLVVEALMQAAANGDFKEFTRAGHISARAARNIIPGLREGLVYSEACARVGYDHAARLSVPLDQVGSPVTRKALSEALKQVRAVAREYGPIDYFHIELARSVGKSAEERKQLTDGIEARNVEKAKRRKQAEEHLGRAPSDDELLRYELAKEQNFKCIYSGDAIDPAGVAANDTRYQVDHILPWSRFGDDSYLNKTLCTARSNQNKRGRTPFEWFEADKTDVEWMEYVARVENLQEVKGRKKRNYSIKDAAAIEDKFKARNLTDTQWATRLLADELSRMFPPRECERAICGRADGGNDGLTIVEERRVFTRPGAITSKLRRAWGLEGLKKQDGKRVEDDRHHAVDALVLAATTESLLQRLTVEVQRREREGRPDDIFHCAEPWRGFRADVRRTVYGSETMPGIFVSRAERRRARGKAHDATIKQIREIEGERLVFERKPVEKLTDKDLEKIPIPKPYGQVSDPKRLRDELVESLRAWIAAGKPKDRPPLSPKGDVIRKVRIQTNDKVSVEINGGTVDRGDMARVDVFRKKNKKAVWEYYVVPIYPHQIVALNDPPDRAVIAYAEDKDWKEIDSSYEFLWSLFGLSYVEISKANGECIDGYFRGLHRGTGAASVCKHISLGKDATVSGIGLKTLASFKKFTIDRLGRKFEIPREVRTWRGEACT

SEQ ID NO: 32 - protein, 1149 aa, Lactobacillus salivarius
MERYHIGLDIGTSSIGWAVIGDDFKIKRKKGKNLIGVRLFKEGDTAAERRGFRTQRRRLNRRKWRLKLLEEIFDPYMAEVDKYFFARLKESNLSPKDSNKKYLGSLLFPDISDSNFYDKYPTIYHLRRDLMEKDKKFDLREIYLAIHHIVKYRGNFLEKVPAKNYKNSGASIGFLLEEVNDLYGNIIGNEDVAILDNDKFEDVEKIILNDEIRNIDKQKNVGRLLVKDKKEKNIVTAFSKAIFGYKFNLEDLLLIESDEKNKLTFNDENIDDIFNELSHSLNDNQMDLLTKTREIYFKFKLNMIVPTGYTISESMIEKYEMHKAHLKMYKEFINTLNAKDRKILKNAYSDYINNEKAKAANAQENFYKTVKKTIKENDSDTAKKIIGLIDEGNFMPKQRTGENGVIPHQLHQIELDRIIENQAKYYPWLAEENPVEKNRKFAKYKLDELVTFRVPYYVGPLIDKTESNKNEKETKFAWMVRKAKGTITPWNFENLVDRTESANRFIKRMTSKDTYIIGEDVLPASSLLYEKYKVLNELNNIKVNKKKLDVEQKQHVYLDLFTTRKNVTKDDLATSLNCDVESITGLTDNKKFNSSLSSYIDLKAILGNIVDDYSKNEDLEKIIEYSTIFEDGNIYKEKLSEISWLTDEQIEKLSNIHFKGWGRLSKKLLTQITNENGERIIDTLWNTSNNFIQVISDESIQAKLAEINGEYANKYNLEDILDEAYTSPQNKKAIRQVMKVVEDIEKAMKCEPTSIAIEFTREKRKSKLTNTRYKKISETYEKITDELISEYELGKLQSELDSKVNNMRDRYYLYFMQLGRDMYTGEKMNIDELHQKYDIDHILPQSFIKDDSLNNRVLTSKSVNIKEKSDKTAADLYAAKMGDFWRKLRKQGLMTEQKYKNLLTRTDSINKYTKQSFIKRQLVETSQVVKLAANILQDKYRNTKIIEIRARLNSDLRKKYELIKNREVNDYHHAIDGYLTTFVGQYLYKVYPKLRSYFVYDDFKKLDSNYLKHMDKFNFIWKLEDKKAEDVYDKVNDEFVLNVPEMKEYIRKIYNYKYMLVSKEVTTKNGAFYDQTKYNAKTINLIPIKKDKPTNIYGGYKGKVSSYMMLVKIQKKKEVIYKFVGVPRLWTDELDRLIDTDEKKALLKK

SEQ ID NO: 33 - protein, 1064 aa, Rhodopseudomonas palustris
MSECVTRRILGIDLGIASCGWGVIEVGEASGSIIASGVRCFDAPLIDKTGEPKSATRRTARGQRRIIRRRRQRMNAVRRLLAEFGVLTGRSPDALHQALLRLSQSVAGSQVTPWTLRAAAHERKLTNDELAVVLGHIARHRGFRSNSKNDGGANAADETSKMKKAMETTREGLARYHSFGAMIASDPKFADRKRNRDKDYSHTAKRSDLEDEVRTIFRSQTRFGSLVASEKLSQAFADAAFFQRPLQDSEDMVGSCPFEPGQKRTARRAPSFELFRFLSRLANLKLTVGRAPERRLTPDEIALAAKGFGETKKSITFKSLREALDLDPNARFSGVAKEKESTLDVAARTGGAAYGTKTLKDALGDAPWRSLSRMPEKLDRIAEILSFREDMKAIRNGLEEVGLDGLVVDALMQATANGDFKDFTRAAHISALAARNIIPGLREGLVYSDACTRVGYDHAARPAVPLSQIGSPVTRKALSEALKQVRAVAREYGPIDYFHIELARSIGKSAEERKKLTDGIEARNVEKEKRRKEAAEHLGRAPSDDELLRYELAKEQNFKCIYSGDPIDPAGISANDTRYQVDHILPWSRFGDDSYVNKTLCTARSNQNKRGRTPFEWFDADKTEAEWMEYSARVEDLKEVKGRKKRNYSIKDAASVEDKFKARNLTDTQWATRLLADELKRMFPPRECERVVTVRADGGNDGLSIVEERRVFTRPGAITSKLRRAWGLEGLKKQDGKRVEDDRHHAVDALVLAATTESLLNRLTVEVQQREREGRQDDIFHCSQPWPGFRVDVQRTVYGSETMPGIFVSRAERRRARGKAHDATVKQIRDIDGERIVFERKPIEKLTDKDLERIPVPEPYGKAADPKKLRDELVENLRAWIAAGKPKDKPPRSPKGDIIRKVRIETKDKVAVEINGGTVDRGDMARVDVFRKKNKKGVWEFYVIPIYPHQIVASALPPNRAVIAYKAESEWTAIDGCFEFAWSLNPMSYLELVKSNGELIEGYFRSMDRTTGAINLSPMSTNSETIRSIGVKTLSSFRKFTVDRLGRKFEIPREVRTWRGEACT

SEQ ID NO: 34 - protein, 1166 aa, Nitrobacter hamburgensis
MHVEIDFPHFSRGDSHLAMNKNEILRGSSVLYRLGLDLGSNSLGWFVTHLEKRGDRHEPVALGPGGVRIFPDGRDPQSGTSNAVDRRMARGARKRRDRFVERRKELIAALIKYNLLPDDARERRALEVLDPYALRKTALTDTLPAHHVGRALFHLNQRRGFQSNRKTDSKQSEDGAIKQAASRLATDKGNETLGVFFADMHLRKSYEDRQTAIRAELVRLGKDHLTGNARKKIWAKVRKRLFGDEVLPRADAPHGVRARATITGTKASYDYYPTRDMLRDEFNAIWAGQSAHHATITDEARTEIEHIIFYQRPLKPAIVGKCTLDPATRPFKEDPEGYRAPWSHPLAQRFRILSEARNLEIRDTGKGSRRLTKEQSDLVVAALLANREVKFDKLRTLLKLPAEARFNLESDRRAALDGDQTAARLSDKKGFNKAWRGFPPERQIAIVARLEETEDENELIAWLEKECALDGAAAARVANTTLPDGHCRLGLRAIKKIVPIMQDGLDEDGVAGAGYHIAAKRAGYDHAKLPTGEQLGRLPYYGQWLQDAVVGSGDARDQKEKQYGQFPNPTVHIGLGQLRRVVNDLIDKYGPPTEISIEFTRALKLSEQQKAERQREQRRNQDKNKARAEELAKFGRPANPRNLLKMRLWEELAHDPLDRKCVYTGEQISIERLLSDEVDIDHILPVAMTLDDSPANKIICMRYANRHKRKQTPSEAFGSSPTLQGHRYNWDDIAARATGLPRNKRWRFDANAREEFDKRGGFLARQLNETGWLARLAKQYLGAVTDPNQIWVVPGRLTSMLRGKWGLNGLLPSDNYAGVQDKAEEFLASTDDMEFSGVKNRADHRHHAIDGLVTALTDRSLLWKMANAYDEEHEKFVIEPPWPTMRDDLKAALEKMVVSHKPDHGIEGKLHEDSAYGFVKPLDATGLKEEEAGNLVYRKAIESLNENEVDRIRDIQLRTIVRDHVNVEKTKGVALADALRQLQAPSDDYPQFKHGLRHVRILKKEKGDYLVPIANRASGVAYKAYSAGENFCVEVFETAGGKWDGEAVRRFDANKKNAGPKIAHAPQWRDANEGAKLVMRIHKGDLIRLDHEGRARIMVVHRLDAAAGRFKLADHNETGNLDKRHATNNDIDPFRWLMASYNTLKKLAAVPVRVDELGRVWRVMPN

SEQ ID NO: 35 - protein, 641 aa, Nitrobacter hamburgensis
MHKRNSRSYRLGLDLGSNSLGWFVTHLEKRGDRYEPVALDPGGVRIFPDGRDPQSGMSNAVDRRMARGARKRRDRFVDPYALRKAALTNALPAHRVGRAIFHLNQRRGFQSNRKTDRKQSEDGAIKQAASKLKARMHEEAAPTLGAFFADMHLRKSYDDQQTAIRAELVRLGKDHLTGNARKKVWAKVRKRLFGDEVLRPKDTSDGARARATTTGTKASYDFYPTRAMLLDEFNAIWAAQREHHLAMTDEAKAEIEHIIFYHRPLKPAIVGKCTLDPATRPFKEDPEGYRAPWSHPLAQRFRILSEARNLEIRETGKTSRRLTKDQSDLVVAALLANREVKFDKLRTLLKLPAEARFNLESDRRSTATRPPHGCRTRRASIRRGAGFLRNGRSRSSPDWKKPKTKTNCSHGSKWNAHLTAQRPRASPIRRCRTAIAGSACAQSKRSCRSCRTSSMRMALRAPAITSWPSVPATTIPVDTFQQGGNAFGRILSVVTIELFAITDRVDPVQEQDARCFALRIAECRSDGLQHFAEVSLGLPPRNAAQDQRHSAGLCQSSCVGRFVPGTPCRRTPRSTSLHGKEPSAHAFGSTARSRPQLPASPRPCMSFRDGTSSSPARMPETLDRCAISRSNRSSVCRAERL

SEQ ID NO: 36 - protein, 1368 aa, Streptococcus pyogenes
MDKKYSIGLDIGTNSVGWAVITDDYKVPSKKFKVLGNTDRHSIKKNLIGALLFDSGEIAEATRLKRTARRRYTRRKNRICYLQEIFSNEMAKVDDSFFHRLEESFLVEEDKKHERHPIFGNIVDEVAYHEKYPTIYHLRKKLVDSTDKADLRLIYLALAHMIKFRGHFLIEGDLNPDNSDVDKLFIQLVQTYNQLFEENPINASGVDAKAILSARLSKSRRLENLIAQLPGEKKNGLFGNLIALSLGLTPNFKSNFDLAEDAKLQLSKDTYDDDLDNLLAQIGDQYADLFLAAKNLSDAILLSDILRLNSEITKAPLSASMIKRYDEHHQDLTLLKALVRQQLPEKYKEIFFDQSKNGYAGYIDGGASQEEFYKFIKPILEKMDGTEELLAKLNREDLLRKQRTFDNGSIPHQIHLGELHAILRRQEDFYPFLKDNREKIEKILTFRIPYYVGPLARGNSRFAWMTRKSEETITPWNFEEVVDKGASAQSFIERMTNFDKNLPNEKVLPKHSLLYEYFTVYNELTKVKYVTEGMRKPAFLSGEQKKAIVDLLFKTNRKVTVKQLKEDYFKKIECFDSVEISGVEDRFNASLGTYHDLLKIIKDKDFLDNEENEDILEDIVLTLTLFEDREMIEERLKTYAHLFDDKVMKQLKRRRYTVWGRLSRKLINGIRDKQSGKTILDFLKSDGFANRNFMQLIHDDSLTFKEDIQKAQVSGQGDSLHEHIANLAGSPAIKKGILQTVKVVDELVKVMGRHKPENIVIEMARENQTTQKGQKNSRERMKRIEEGIKELGSQILKEHPVENTQLQNEKLYLYYLQNGRDMYVDQELDINRLSDYDVDHIVPQSFIKDDSIDNKVLTRSDKNRGKSDNVPSEEVVKKMKNYWRQLLNAKLITQRKFDNLTKAERGGLSELDKAGFIKRQLVETRQITKHVAQILDSRMNTKYDENDKLIREVKVITLKSKLVSDFRKDFQFYKVREINNYHHAHDAYLNAVVGTALIKKYPKLESEFVYGDYKVYDVRKMLAKSEQEIGKATAKYFFYSNIMNFFKTEITLANGEIRKRPLIETNGETGEIVWDKGRDFATVRKVLSMPQVNIVKKTEVQTGGFSKESILPKRNSDKLIARKKDWDPKKYGGFDSPTVAYSVLVVAKVEKGKSKKLKSVKELLGITIMERSSFEKNPIDFLEAKGYKEVRKDLIIKLPKYSLFELENGRKRMLASAGELQKGNELALPSKYVNFLYLASHYEKLKGSPEDNEQKQLFVEQHKHYLDEIIEQISEFSKRVILADANLDKVLSAYNKHRDKPIREQAENIIHLFTLTNLGAPTAFKYFDTTIDRKRYTSTKEVLDATFIHQSITGLYETRIDLSQLGGD

SEQ ID NO: 37 - protein, 1368 aa, Streptococcus pyogenes
MDKKYSIGLDIGTNSVGWAVITDDYKVPSKKFKVLGNTDRHSIKKNLIGALLFDSGETAEATRLKRTARRRYTRRKNRICYLQEIFSNEMAKVDDSFFHRLEESFLVEEDKKHERHPIFGNIVDEVAYHEKYPTIYHLRKKLVDSTDKADLRLIYLALAHMIKFRGHFLIEGDLNPDNSDVDKLFIQLVQTYNQLFEENPINASGVDAKAILSARLSKSRRLENLIAQLPGEKKNGLFGNLIALSLGLTPNFKSNFDLAEDAKLQLSKDTYDDDLDNLLAQIGDQYADLFLAAKNLSDAILLSDILRLNSEITKAPLSASMIKRYDEHHQDLTLLKALVRQQLPEKYKEIFFDQSKNGYAGYIDGGASQEEFYKFIKPILEKMDGTEELLAKLNREDLLRKQRTFDNGSIPHQIHLGELHAILRRQEDFYPFLKDNREKIEKILTFRIPYYVGPLARGNSRFAWMTRKSEETITPWNFEEVVDKGASAQSFIERMTNFDKNLPNEKVLPKHSLLYEYFTVYNELTKVKYVTEGMRKPAFLSGEQKKAIVDLLFKTNRKVTVKQLKEDYFKKIECFDSVEISGVEDRFNASLGTYHDLLKIIKDKDFLDNEENEDILEDIVLTLTLFEDREMIEERLKTYAHLFDDKVMKQLKRRRYTGWGRLSRKLINGIRDKQSGKTILDFLKSDGFANRNFMQLIHDDSLTFKEDIQKAQVSGQGDSLHEHIANLAGSPAIKKGILQTVKVVDELVKVMGRHKPENIVIEMARENQTTQKGQKNSRERMKRIEEGIKELGSQILKEHPVENTQLQNEKLYLYYLQNGRDMYVDQELDINRLSDYDVDHIVPQSFIKDDSIDNKVLTRSDKNRGKSDNVPSEEVVKKMKNYWRQLLNAKLITQRKFDNLTKAERGGLSELDKAGFIKRQLVETRQITKHVAQILDSRMNTKYDENDKLIREVKVITLKSKLVSDFRKDFQFYKVREINNYHHAHDAYLNAVVGTALIKKYPKLESEFVYGDYKVYDVRKMIAKSEQEIGKATAKYFFYSNIMNFFKTEITLANGEIRKRPLIETNGETGEIVWDKGRDFATVRKVLSMPQVNIVKKTEVQTGGFSKESILPKRNSDKLIARKKDWDPKKYGGFDSPTVAYSVLVVAKVEKGKSKKLKSVKELLGLTIMERSSFEKNPIDFLEAKGYKEVKKDLIIKLPKYSLFELENGRKRMLASAGELQKGNELALPSKYVNFLYLASHYEKLKGSPEDNEQKQLFVEQHKHYLDEIIEQISEFSKRVILADANLDKVLSAYNKHRDKPIREQAENIIHLFTLTNLGAPAAFKYFDTTIDRKRYTSTKEVLDATLIHQSITGLYETRIDLSQLGGD

SEQ ID NO: 38 - protein, 1368 aa, Streptococcus pyogenes
MDKKYSIGLDIGTNSVGWAVITDDYKVPSKKFKVLGNTDRHSIKKNLIGALLFDSGEIAEATRLKRTARRRYTRRKNRICYLQEIFSNEMAKVDDSFFHRLEESFLVEEDKKHERHPIFGNIVDEVAYHEKYPTIYHLRKKLVDSTDKADLRLIYLALAHMIKFRGHFLIEGDLNPDNSDVDKLFIQLVQTYNQLFEENPINASGVDAKAILSARLSKSRRLENLIAQLPGEKKNGLFGNLIALSLGLTPNFKSNFDLAEDAKLQLSKDTYDDDLDNLLAQIGDQYADLFLAAKNLSDAILLSDILRLNSEITKAPLSASMIKRYDEHHQDLTLLKALVRQQLPEKYKEIFFDQSKNGYAGYIDGGASQEEFYKFIKPILEKMDGTEELLAKLNREDLLRKQRTFDNGSIPHQIHLGELHAILRRQEDFYPFLKDNREKIEKILTFRIPYYVGPLARGNSRFAWMTRKSEETITPWNFEEVVDKGASAQSFIERMTNFDKNLPNEKVLPKHSLLYEYFTVYNELTKVKYVTEGMRKPAFLSGEQKKAIVDLLFKTNRKVTVKQLKEDYFKKIECFDSVEISGVEDRFNASLGTYHDLLKIIKDKDFLDNEENEDILEDIVLTLTLFEDREMIEERLKTYAHLFDDKVMKQLKRRRYTGWGRLSRKLINGIRDKQSGKTILDFLKSDGFANRNFMQLIHDDSLTFKEDIQKAQVSGQGDSLHEHIANLAGSPAIKKGILQTVKVVDELVKVMGRHKPENIVIEMARENQTTQKGQKNSRERMKRIEEGIKELGSQILKEHPVENTQLQNEKLYLYYLQNGRDMYVDQELDINRLSDYDVDHIVPQSFIKDDSIDNKVLTRSDKNRGKSDNVPSEEVVKKMKNYWRQLLNAKLITQRKFDNLTKAERGGLSELDKAGFIKRQLVETRQITKHVAQILDSRMNTKYDENDKLIREVKVITLKSKLVSDFRKDFQFYKVREINNYHHAHDAYLNAVVGTALIKKYPKLESEFVYGDYKVYDVRKMLAKSEQEIGKATAKYFFYSNIMNFFKTEITLANGEIRKRPLIETNGETGEIVWDKGRDFATVRKVLSMPQVNIVKKTEVQTGGFSKESILPKRNSDKLIARKKDWDPKKYGGFDSPTVAYSVLVVAKVEKGKSKKLKSVKELLGITIMERSSFEKNPIDFLEAKGYKEVRKDLIIKLPKYSLFELENGRKRMLASAGELQKGNELALPSKYVNFLYLASHYEKLKGSPEDNEQKQLFVEQHKHYLDEIIEQISEFSKRVILADANLDKVLSAYNKHRDKPIREQAENIIHLFTLTNLGAPTAFKYFDTTIDRKRYTSTKEVLDATFIHQSITGLYETRIDLSQLGGD

SEQ ID NO: 39 - protein, 1371 aa, Streptococcus pyogenes
MDKKYSIGLDIGTNSVGWAVITDDYKVPSKKFKVLGNTDRHSIKKNLIGALLFDSGETAEATRLKRTARRRYTRRKNRICYLQEIFSNEMAKVDDSFFHRLEESFLVEEDKKHERHPIFGNIVDEVAYHEKYPTIYHLRKKLADSTDKADLRLIYLALAHMIKFRGHFLIEGDLNPDNSDVDKLFIQLVQTYNQLFEENPINASRVDAKAILSARLSKSRRLENLIAQLPGEKKNGLFGNLIALSLGLTPNFKSNFDLAEDAKLQLSKDTYDDDLDNLLAQIGDQYADLFLAAKNLSDATLLSDILRVNSEITKAPLSASMIKRYDEHHQDLTLLKALVRQQLPEKYKEIFFDQSKNGYAGYIDGGASQEEFYKFIKPILEKMDGTEELLAKLNREDLLRKQRTFDNGSIPHQIHLGELHAILRRQEDFYPFLKDNREKIEKILTFRIPYYVGPLARGNSRFAWMTRKSEETITPWNFEEVVDKGASAQSFIERMTNFDKNLPNEKVLPKHSLLYEYFTVYNELTKVKYVTEGMRKPAFLSGEQKKAIVDLLFKTNRKVTVKQLKEDYFKKIECFDSVEISGVEDRFNASLGTYHDLLKIIKDKDFLDNEENEDILEDIVLTLTLFEDKEMIEERLKTYAHLFDDKVMKQLKRRHYTGWGRLSRKLINGIRDKQSGKTILDFLKSDGFANRNFIQLIHDDSLTFKEAIQKAQVSGQGHSLHEQIANLAGSPAIKKGILQSVKVVDELVKVMGHKPENIVIEMARENQTTQKGQKNSRERMKRIEEGIKELGSQILKEHPVENTQLQNEKLYLYYLQNGRDMYVDQELDINRLSDYDVDHIVPQSFIKDDSIDNKVLTRSDKNRGKSDDVPSEEVVKKMKNYWRQLLNAKLITQRKFDNLTKAERGGLSELDKAGFIKRQLVETRQITKHVAQILDSRMNTKYDENDKLIREVKVITLKSKLVSDFRKDFQFYKVREINNYHHAHDAYLNAVVGTALIKKYPKLESEFVYGDYKVYDVRKMIAKSEQEIGKATAKRFFYSNIMNFFKTEITLANGEIRKRPLIETNEETGEIVWDKGRDFATVRKVLSMPQVNIVKKTEVQTGALTNESIYARGSFDKLISRKHRFESSKYGGFGSPTVTYSVLVVAKSKVQDGKVKKIKTGKELIGITLLDKLVFEKNPLKFIEDKGYGNVQIDKCIKLPKYSLFEFENGTRRMLASVMANNNSRGDLQKANEMFLPAKLVTLLYHAHKIESSKELEHEAYILDHYNDLYQLLSYIERFASLYVDVEKNISKVKELFSNIESYSISEICSSVINLLTLTASGAPADFKFLGTTIPRKRYGSPQSILSSTLIHQSITGLYETRIDLSQLGSD

SEQ ID NO: 40 - protein, 1121 aa, Streptococcus thermophilus
MSDLVLGLDIGIGSVGVGILNKVTGEIIHKNSRIFPAAQAENNLVRRTNRQGRRLARRKKHRRVRLNRLFEESGLITDFTKISINLNPYQLRVKGLTDELSNEELFIALKNMVKHRGISYLDDASDDGNSSVGDYAQIVKENSKQLETKTPGQIQLERYQTYGQLRGDFTVEKDGKKHRLINVFPTSAYRSEALRILQTQQEFNPQITDEFINRYLEILTGKRKYYHGPGNEKSRTDYGRYRTSGETLDNIFGILIGKCTFYPDEFRAAKASYTAQEFNLLNDLNNLTVPTETKKLSKEQKNQIINYVKNEKAMGPAKLFKYIAKLLSCDVADIKGYRIDKSGKAEIHTFEAYRKMKTLETLDIEQMDRETLDKLAYVLTLNTEREGIQEALEHEFADGSFSQKQVDELVQFRKANSSIFGKGWHNFSVKLMMELIPELYETSEEQMTILTRLGKQKTTSSSNKTKYIDEKLLTEEIYNPVVAKSVRQAIKIVNAAIKEYGDFDNIVIEMARETNEDDEKKAIQKIQKANKDEKDAAMLKAANQYNGKAELPHSVFHGHKQLATKIRLWHQQGERCLYTGKTISIHDLINNSNQFEVDHILPLSITFDDSLANKVLVYATANQEKGQRTPYQALDSMDDAWSFRELKAFVRESKTLSNKKKEYLLTEEDISKFDVRKKFIERNLVDTRYASRVVLNALQEHFRAHKIDTKVSVVRGQFTSQLRRHWGIEKTRDTYHHHAVDALIIAASSQLNLWKKQKNTLVSYSEDQLLDIETGELISDDEYKESVFKAPYQHFVDTLKSKEFEDSILFSYQVDSKFNRKISDATIYATRQAKVGKDKADETYVLGKIKDIYTQDGYDAFMKIYKKDKSKFLMYRHDPQTFEKVIEPILENYPNKQINEKGKEVPCNPFLKYKEEHGYIRKYSKKGNGPEIKSLKYYDSKLGNHIDITPKDSNNKVVLQSVSPWRADVYFNKTTGKYEILGLKYADLQFEKGTGTYKISQEKYNDIKKKEGVDSDSEFKFTLYKNDLLLVKDTETKEQQLFRFLSRTMPKQKHYVELKPYDKQKFEGGEALIKVLGNVANSGQCKKGLGKSNISIYKVRTDVLGNQHIIKNEGDKPKLDF

SEQ ID NO: 41 - protein, 1388 aa, Streptococcus thermophilus
MTKPYSIGLDIGTNSVGWAVTTDNYKVPSKKMKVLGNTSKKYIKKNLLGVLLFDSGITAEGRRLKRTARRRYTRRRNRILYLQEIFSTEMATLDDAFFQRLDDSFLVPDDKRDSKYPIFGNLVEEKAYHDEFPTIYHLRKYLADSTKKADLRLVYLALAHMIKYRGHFLIEGEFNSKNNDIQKNFQDFLDTYNAIFESDLSLENSKQLEEIVKDKISKLEKKDRILKLFPGEKNSGIFSEFLKLIVGNQADFRKCFNLDEKASLHFSKESYDEDLETLLGYIGDDYSDVFLKAKKLYDAILLSGFLTVTDNETEAPLSSAMIKRYNEHKEDLALLKEYIRNISLKTYNEVFKDDTKNGYAGYIDGKTNQEDFYVYLKKLLAEFEGADYFLEKIDREDFLRKQRTFDNGSIPYQIHLQEMRAILDKQAKFYPFLAKNKERIEKILTFRIPYYVGPLARGNSDFAWSIRKRNEKITPWNFEDVIDKESSAEAFINRMTSFDLYLPEEKVLPKHSLLYETFNVYNELTKVRFIAESMRDYQFLDSKQKKDIVRLYFKDKRKVTDKDIIEYLHAIYGYDGIELKGIEKQFNSSLSTYHDLLNIINDKEFLDDSSNEAIIEEIIHTLTIFEDREMIKQRLSKFENIFDKSVLKKLSRRHYTGWGKLSAKLINGIRDEKSGNTILDYLIDDGISNRNFMQLIHDDALSFKKKIQKAQIIGDEDKGNIKEVVKSLPGSPAIKKGILQSIKIVDELVKVMGGRKPESIVVEMARENQYTNQGKSNSQQRLKRLEKSLKELGSKILKENIPAKLSKIDNNALQNDRLYLYYLQNGKDMYTGDDLDIDRLSNYDIDHIIPQAFLKDNSIDNKVLVSSASNRGKSDDVPSLEVVKKRKTFWYQLLKSKLISQRKFDNLTKAERGGLSPEDKAGFIQRQLVETRQITKHVARLLDEKFNNKKDENNRAVRTVKIITLKSTLVSQFRKDFELYKVREINDFHHAHDAYLNAVVASALLKKYPKLEPEFVYGDYPKYNSFRERKSATEKVYFYSNIMNIFKKSISLADGRVIERPLIEVNEETGESVWNKESDLATVRRVLSYPQVNVVKKVEEQNHGLDRGKPKGLFNANLSSKPKPNSNENLVGAKEYLDPKKYGGYAGISNSFTVLVKGTIEKGAKKKITNVLEFQGISILDRINYRKDKLNFLLEKGYKDIELIIELPKYSLFELSDGSRRMLASILSTNNKRGEIHKGNQIFLSQKFVKLLYHAKRISNTINENHRKYVENHKKEFEELFYYILEFNENYVGAKKNGKLLNSAFQSWQNHSIDELCSSFIGPTGSERKGLFELTSRGSAADFEFLGVKIPRYRDYTPSSLLKDATLIHQSVTGLYETRIDLAKLGEG

SEQ ID NO: 42 - protein, 1138 aa, Acidothermus cellulolyticus
MGGSEVGTVPVTWRLGVDVGERSIGLAAVSYEEDKPKEILAAVSWIHDGGVGDERSGASRLALRGMARRARRLRRFRRARLRDLDMLLSELGWTPLPDKNVSPVDAWLARKRLAEEYVVDETERRRLLGYAVSHMARHRGWRNPWTTIKDLKNLPQPSDSWERTRESLEARYSVSLEPGTVGQWAGYLLQRAPGIRLNPTQQSAGRRAELSNATAFETRLRQEDVLWELRCIADVQGLPEDVVSNVIDAVFCQKRPSVPAERIGRDPLDPSQLRASRACLEFQEYRIVAAVANLRIRDGSGSRPLSLEERNAVIEALLAQTERSLTWSDIALEILKLPNESDLTSVPEEDGPSSLAYSQFAPFDETSARIAEFIAKNRRKIPTFAQWWQEQDRTSRSDLVAALADNSIAGEEEQELLVHLPDAELEALEGLALPSGRVAYSRLTLSGLTRVMRDDGVDVHNARKTCFGVDDNWRPPLPALHEATGHPVVDRNLAILRKFLSSATMRWGPPQSIVVELARGASESRERQAEEEAARRAHRKANDRIRAELRASGLSDPSPADLVRARLLELYDCHCMYCGAPISWENSELDHIVPRTDGGSNRHENLAITCGACNKEKGRRPFASWAETSNRVQLRDVIDRVQKLKYSGNMYWTRDEFSRYKKSVVARLKRRTSDPEVIQSIESTGYAAVALRDRLLSYGEKNGVAQVAVFRGGVTAEARRWLDISIERLFSRVAIFAQSTSTKRLDRRHHAVDAVVLTTLTPGVAKTLADARSRRVSAEFWRRPSDVNRHSTEEPQSPAYRQWKESCSGLGDLLISTAARDSIAVAAPLRLRPTGALHEETLRAFSEHTVGAAWKGAELRRIVEPEVYAAFLALTDPGGRFLKVSPSEDVLPADENRHIVLSDRVLGPRDRVKLFPDDRGSIRVRGGAAYIASFHHARVFRWGSSHSPSFALLRVSLADLAVAGLLRDGVDVFTAELPPWTPAWRYASIALVKAVESGDAKQVGWLVPGDELDFGPEGVTTAAGDLSMFLKYFPERHWVVTGFEDDKRINLKPAFLSAEQAEVLRTERSDRPDTLTEAGEILAQFFPRCWRATVAKVLCHPGLTVIRRTALGQPRWRRGHLPYSWRPWSADPWSGGTP

SEQ ID NO: 43 - protein, 1629 aa, Francisella novicida
MNFKILPIAIDLGVKNTGVFSAFYQKGTSLERLDNKNGKVYELSKDSYTLLMNNRTARRHQRRGIDRKQLVKRLFKLIWTEQLNLEWDKDTQQAISFLFNRRGFSFITDGYSPEYLNIVPEQVKAILMDIFDDYNGEDDLDSYLKLATEQESKISEIYNKLMQKILEFKLMKLCTDIKDDKVSTKTLKEITSYEFELLADYLANYSESLKTQKFSYTDKQGNLKELSYYHHDKYNIQEFLKRHATINDRILDTLLTDDLDIWNFNFEKFDFDKNEEKLQNQEDKDHIQAHLHHFVFAVNKIKSEMASGGRHRSQYFQEITNVLDENNHQEGYLKNFCENLHNKKYSNLSVKNLVNLIGNLSNLELKPLRKYFNDKIHAKADHWDEQKFTETYCHWILGEWRVGVKDQDKKDGAKYSYKDLCNELKQKVTKAGLVDFLLELDPCRTIPPYLDNNNRKPPKCQSLILNPKFLDNQYPNWQQYLQELKKLQSIQNYLDSFETDLKVLKSSKDQPYFVEYKSSNQQIASGQRDYKDLDARILQFIFDRVKASDELLLNEIYFQAKKLKQKASSELEKLESSKKLDEVIANSQLSQILKSQHTNGIFEQGTFLHLVCKYYKQRQRARDSRLYIMPEYRYDKKLHKYNNTGRFDDDNQLLTYCNHKPRQKRYQLLNDLAGVLQVSPNFLKDKIGSDDDLFISKWLVEHIRGFKKACEDSLKIQKDNRGLLNHKINIARNTKGKCEKEIFNLICKIEGSEDKKGNYKHGLAYELGVLLFGEPNEASKPEFDRKIKKFNSIYSFAQIQQIAFAERKGNANTCAVCSADNAHRMQQIKITEPVEDNKDKIILSAKAQRLPAIPTRIVDGAVKKMATILAKNIVDDNWQNIKQVLSAKHQLHIPIITESNAFEFEPALADVKGKSLKDRRKKALERISPENIFKDKNNRIKEFAKGISAYSGANLTDGDFDGAKEELDHIIPRSHKKYGTLNDEANLICVTRGDNKNKGNRIFCLRDLADNYKLKQFETTDDLEIEKKIADTIWDANKKDFKFGNYRSFINLTPQEQKAFRHALFLADENPIKQAVIRAINNRNRTFVNGTQRYFAEVLANNIYLRAKKENLNTDKISFDYFGIPTIGNGRGIAEIRQLYEKVDSDIQAYAKGDKPQASYSHLIDAMLAFCIAADEHRNDGSIGLEIDKNYSLYPLDKNTGEVFTKDIFSQIKITDNEFSDKKLVRKKAIEGFNTHRQMTRDGIYAENYLPILIHKELNEVRKGYTWKNSEEIKIFKGKKYDIQQLNNLVYCLKFVDKPISIDIQISTLEELRNILTTNNIAATAEYYYINLKTQKLHEYYIENYNTALGYKKYSKEMEFLRSLAYRSERVKIKSIDDVKQVLDKDSNFIIGKITLPFKKEWQRLYREWQNTTIKDDYEFLKSFFNVKSITKLHKKVRKDFSLPISTNEGKFLVKRKTWDNNFIYQILNDSDSRADGTKPFIPAFDISKNEIVEAIIDSFTSKNIFWLPKNIELQKVDNKNIFAIDTSKWFEVETPSDLRDIGIATIQYKIDNNSRPKVRVKLDYVIDDDSKINYFMNHSLLKSRYPDKVLEILKQSTIIEFESSGFNKTIKEMLGMKLAGIYNETSNN

SEQ ID NO: 44 - protein, 1068 aa, Verminephrobacter eiseniae
MNKAVAYRLALDLGSTSLGWAIFRLNEAREPTAIIRAGVRIFSDGRNANSEPLAVHRRVARAMRRRRDRLLKRKKRMHDQLVQHGFFPAEVAERKELERLNPYQLRAKGLHEALTPGEFARALFHINQRRGFKSNRKTDRKDNDSGALKQAISELRKRIQDSDCATAGEWFWKERMQQKPEGVRGQWVRARYRKTPSTTDEGKKRIGYDLYVDRAMVEQEFDALWAAQAALQPGLFTEAARAELKDTLLYQRDLRPVKPGRCTLLPAEERAPLALPSTQRFRILQEVNNLRLLDEALREVPLNLAQRDAVVSALEGKKELSFAAIRKLLTLSGKFNLEDEKRAELKGNATSVILARKDLFGDAWAGFDAAVQDEIVWRLVSQESEGALIAWLQQHTGVDGVCAEAIVNTRLPDGYGRLSRKALERIVPALQREVCTYDKAVQAAGFAHHSDLGFDFDYAEDEVQQVGEHTIASTGEVQAQYAFKQLPYYGKALQRHVAFGSGDAKDHEEKCYGKIANPTVHIGLNQVRTVVNALIRRYGHPTEVVVELARDLKQSREQKQQTQREQADNQKRNEDIRKRIAPILETSPERVRDRDIKKWILWEELNKKDIADRHCPYSGERISATMLLSEAVEIEHILPFSRTLDDSLNNRTVAMRRANRIKGDRTPWEARADFEAQGWRYEAILQRAEGMPPRKRYRFAEDGYQRWLGKDRNFLARALNDTSYLSRLAANYLRLVCPQGVRVIPGQMTDKLRGKFGLNSVLGLDGKKNRNDHRHHAVDACVIGVTDQGLMQRFANASKQARENGLTRLVQDMLLPWWPSYYDHVERAVRHIRVSHRPDHGFEGAMMKGTAHGIREDGIREDGRIKQRPKAKGSADHKTITLIPIDEPRQLARHGVDAEGKPLPYKGYASGSNYCIEITKNGKGKWEGQVISTFDAYRIKAAADAAARAGQVISTVEADSIVRKSGWERLRGAQSQNGQPLVMRLVIGDSVRMEVDGRDEVMRVVKMSGKEMVFAPVREANVDKRNNMPDEQDPFTYTYKRADQLRKAKARQVTISPIGELRDPGFKG

SEQ ID NO: 45 - protein, 1125 aa, Francisella tularensis
MNVKILPIAIDLDVKNTGVFSAFYQKGTSLEKLDNKNGKVYELSKDSYTLLMNNRTARRHQRRGIDRKQLVKRLFKLVWTEQLNLEWDKDTQQAISFLFNRRGFSFITDGYSTEYLNIVPEQVKAILMDIFDDYNGEDDLDSYLKLATEQESKISEIYNKLMQKILEFKLRKLCTDIKDDKVSTKTLKEITSYEFELLADYLANYSESLKIQKFSYTDKQGNLKELSYYHHDKYNIQEFLKRHATINDEILDTLLTDDFDIWNFNFEKFDFDKNEEKLQNQEDKDHTQAHLHHFVFAVNKIKSEMASGGRHRSQYFQEITNVLDENNHQEGYLKNFCENLHNKKYSNLSVKNLVNLVGNLSNLELKPLRKYFNDKIHAKADHWDEQKFTETYCHWILGEWRVGVKDQDKKDGAKYSYKDLCNELKQKVTKAGLIDFLLELDPCRTIPPYLDNNNRKPPKCQSLILNPKFLDNQYPNWQQYLQELKKLQSIQDYLDSFETDLKDLKSSKDQPYFVEYKSSNQQMASGQRDYKDLDARILQFIFDRVKASDELLLNEIYFQAKKLKQKASSELEKLESSKKLDEVIANSQLSQILKSQHTNGIFEQGTFLHLVCKYYKQRQRARDSRLYIMPEYRYDKKLDKYNNTGRFDDNNQLLTYCNHKPRQKRYQLLNDLAGVLQVSRNQLLSSVEEWFQQAQRVGEISKSQDEQIFEWLKSFKIASYCKAAVEMQKQYRGTLKNAIQTAIFRQSENINKNKNKNTGNQQQALSENSKDVKSLTADEKKLLKLIENIAKASQKIGESLGLNDKQIKKFNSIYSFAQIQQIAFAERKGNANTCAVCSADNAHRMQQIKITELVEDNKDNIILSAKAQRLPAIPTRIVDGAVKKMATILAKNIVDDNWQNIKQVLSAKHQLHIPIITESNAFEFEPALADVKGKSLKDRRKKALERISPENIFKDKNNRIKEFAKGISAYSGANLTDGDFDGAKEELDHIIPRSHKKYGTLNDEANLICVTRDDNKNIFAIDTSKWFEIETPSDLRDIGVATIQYKIDNNSRPKVRVKLDYVIDDDSKINYFMNHSLLKSRYPDKVLEILKQSTIIEFESSGFNKTIKEMLGMTLAGIYNETSNN

SEQ ID NO: 46 - protein, 1064 aa, Bradyrhizobium sp.
MKRTSLRAYRLGVDLGANSLGWFVVWLDDHGQPEGLGPGGVRIFPDGRNPQSKQSNAAGRRLARSARRRRDRYLQRRGKLMGLLVKHGLMPADEPARKRLECLDPYGLRAKALDEVLPLHHVGRALFHLNQRRGLFANRAIEQGDKDASAIKAAAGRLQTSMQACGARTLGEFLNRRHQLRATVRARSPVGGDVQARYEFYPTRAMVDAEFEAIWAAQAPHHPTMTAEAHDTIREAIFSQRAMKRPSIGKCSLDPATSQDDVDGFRCAWSHPLAQRFRIWQDVRNLAVVETGPTSSRLGKEDQDKVARALLQTDQLSFDEIRGLLGLPSDARFNLESDRRDHLKGDATGAILSARRHFGPAWHDRSLDRQIDIVALLESALDEAAIIASLGTTHSLDEAAAQRALSALLPDGYCRLGLRAIKRVLPLMEAGRTYAEAASAAGYDHALLPGGKLSPTGYLPYYGQWLQNDVVGSDDERDTNERRWGRLPNPTVHIGIGQLRRVVNELIRWHGPPAEITVELTRDLKLSPRRLAELEREQAENQRKNDKRTSLLRKLGLPASTHNLLKLRLWDEQGDVASECPYTGEAIGLERLVSDDVDIDHLIPFSISWDDSAANKVVCMRYANREKGNRTPFEAFGHRQGRPYDWADIAERAARLPRGKRWRFGPGARAQFEELGDFQARLLNETSWLARVAKQYLAAVTHPHRIHVLPGRLTALLRATWELNDLLPGSDDRAAKSRKDHRHHAIDALVAALTDQALLRRMANAHDDTRRKIEVLLPWPTFRIDLETRLKAMLVSHKPDHGLQARLHEDTAYGTVEHPETEDGANLVYRKTFVDISEKEIDRIRDRRLRDLVRAHVAGERQQGKTLKAAVLSFAQRRDIAGHPNGIRHVRLTKSIKPDYLVPIRDKAGRIYKSYNAGENAFVDILQAESGRWIARATTVFQANQANESHDAPAAQPIMRVFKGDMLRIDHAGAEKFVKIVRLSPSNNLLYLVEHHQAGVFQTRHDDPEDSFRWLFASFDKLREWNAELVRIDTLGQPWRRKRGLETGSEDATRIGWTRPKKWP

SEQ ID NO: 47 - protein, 1354 aa, Flavobacterium psychrophilum
MKKILGLDLGTNSIGWAFINEAENEIEVSSIVNTGVRIVPLTTDEESDFKKGNTISINADRTLKRGARRGLQRFKQRREALLETFNRIKFIATDFVYAETGAATTFSSYQLRAKSAVEAVTKEELVKVLLMLNKKRGYKSSRKAKTAEEGDAIDGMKIAKEIFENNLTPGQWVYNSLSKGGKFIPDFYHSDLQKELEKIVRFQNQFHSEQINDKLLADIQGKSRTQTSQHFSKTLNIPLAENKGTREETKLQHYQWRNEALANELDMKILAFIITEINNQINQSSGYLGAISDRSKELYFNQETVGQYQYKQLQENVHAKLKNQVFYRQDYLDEFEKIWETQAKFHSELNEKLKAEIRDITIFYQRKLKSQKHLVSFCEFEKGHKAIPKSSPLFQEFRIWQNLNNVVVKNETTKEVFELSEELKQLIAEELQFKESMTDVQMLTFCELKKGTHTVNFKKIEGNRTNTSIYKAFEKILEVEGYEIDFSKMKPLEIKETVAPIFETLNINTVILDFDPTIQGNDFDKQPYYQLWHLLYSAEDDDKLKETLKTKFGFKENHLPFILNINLQADYGSLSAKAIKKILPHLMDGHIYDKACLMVGYNHSSSLTTAQNNDRVLKDTLELLKKNSLRNPVVEKILNQMINVINAIMKDPAMGKPDEIRVELARELKANNEQRKKATSDINTATTEHERIRKLLHSEFNIPRVTRNDIIRYKLWLETGGISLYTGNPIKASDLFSKNYDIEHIIPKSRLFDDSFSNKTLCERQLNIDKSNKTAYSFLQEKLSENDFAAYENRVKDLFKTGKIKSYTKYKKLLMADNEIPEGFIDRQLRETQYIAKKAKEILLEVSRNVTATIGSVTDKLRQDWELVDVMKELNWEKYDKLGLTHIEEGKNGERLSKIKDWTKRNDHRHHAMDAITVAFTKPAYIQYLNNLNAKTQGENKANSIIGIENKHLYRDKNNKLRFISPMKNFREEAKKQLESILISYKAKNKVVTKNKNTTKKSGGTNQKIQLTPRGRLHKETVYGKLQQYATKEEKVNASFTEDYIQKVAKKEYREALLKRLEENDNDPKKAFTGKNALNKTPIYISLKDNIIVPEKVKTVWLETDYTIRKDITPDLKIDKVIDVGIKRILQNRLNEFNGDPKKAFVNLGESPIWLNKEKGIAIKRVTISGVSNAQALHTKKDHLGNEILDKNGNPIPVDFISTGNNHHVAIYRDEKGNLQEEVVSFYDAVIRRNLGLSVINKNHEKGWEFLFSMKQNEFFIFPSDGFNPHEIDLLNPNNYHLISPNIFRVQKISTKNYMFNHHLETKAVDGEMLKSKKELSKTSYHFIQTPTNLNGIIKVRINHLGKIVHLGEY

SEQ ID NO: 48 - protein, 1062 aa, Actinobacillus succinogenes
MNLNYILGLDLGIASVGWAVVEIDEQENPQRLIDVGVRTFDRAEVLKTGESLALARRLARSSRRLVKRRAERIKKAKRLLKAENLLLSADEILPNEAWQLRVKGLDQKLERQEWAAVLLHLLKHRGYLSQRKNESKSENKELGALLSGVAINHQILQSAEYRTPAEIAVNKFQAEEGHIRNQRGAYTHTFSRLDLLAEMELLFQRQATLGNPHTSTKLLENLTALLMWQKPALAGEAILKMLGKCTFEPTEYKAAKNSYSAERFVWLTKLNNLRILEQGAERALTDNERFALLDQPYEKAKLTYAQVRTLLGLSDEAIFKGLRYQGEDKKAVETKTTLMEVKAYHQIRKALEGLDLKAEWNELKNNPALLDEIGTAFSLYKTDDDIHRYLDGKLSESVLNALLENLNFDKFIQLSLKALQQILPLMLQGQRYDEAVSAIYGDHYGKKSDEIDRLLPNIPTDEIRNPVVLRTLTQARKVINAVVRLYGSPARIHIETGREVGKSYQDRKKLEKQQEENRKQRENAVKKFKEYFPNFVGEPKGKDILKMRLYELQQAKCLYSGKSLELYRLLEKGYVEVDHALPFSRTWDDSFNNKVLVLANENQNKGNATPYEWLDGKNNSEGWQHFVARVQTSGFSYAKKQRVLIQELDEKSFIERNLNDTRYVARFLCNHIADNMLLTGKGKRKVFASNGQITALLRGCWGLQKVRENNDRHHALDAVVVACSTKSMQDKITKFVKYKEGRLFKDKKDGVYKGERINRETGEIISLHFPTPWKFFKENVEIRIFSENPKLELENRLPDYPQYNHEFVQPLFVSRMPTRKMTGQGHMETVKSAKRLDKGLSVLKVPLTQLKLSDLERMVNREREMALYEALKECLEQFGNDPAKAFAEPFYKKGGALVKAVRVEQTQKSGVLVRNGNGVADNATGSIVRVDVFTKGGKYFLVPIYTWQVAKGILPNKAVIQGKDESEWEEMDENAVFQFSMHKNDLIKVKTKKGEIFGYFNGLDRATGSIEIEEHDLEKSKGKNGSHRGLGVKTAFFLEKYQVDELGKNIRPCRPTKRQHVR

SEQ ID NO: 49 - protein, 1340 aa, Dorea longicatena
MEQEYYLGLDMGTGSVGWAVTDSEYHVLRKHGKALWGVRLFESASTAEERRMFRTSRRRLDRRNWRIEILQEIFAEEISKKDPGFFLRMKESKYYPEDKRDINGNCPELPYALFVDDDFTDKDYHKKFPTIYHLRKMLMNTEETPDIRLVYLAIHHMMKHRGHFLLSGDINEIKEFGTTFSKLLENIKNEELDWNLELGKEEYAVVESILKDNMLNRSTKKTRLIKALKAKSICEKAVLNLLAGGTVKLSDIFGLEELNETERPKISFADNGYDDYIGEVENELGEQFYIIETAKAVYDWAVLVEILGKYTSISEAKVATYEKHKSDLQFLKKIVRKYLTKEEYKDIFVSTSDKLKNYSAYIGMTKINGKKVDLQSKRCSKEEFYDFIKKNVLKKLEGQPEYEYLKEELERETFLPKQVNRDNGVIPYQIHLYELKKILGNLRDKIDLIKENEDKLVQLFEFRIPYYVGPLNKIDDGKEGKFTWAVRKSNEKIYPWNFENVVDIEASAEKFIRRMTNKCTYLMGEDVLPKDSLLYSKYMVLNELNNVKLDGEKLSVELKQRLYTDVFCKYRKVTVKKIKNYLKCEGIISGNVEITGIDGDFKASLTAYHDFKEILTGTELAKKDKENIITNIVLFGDDKKLLKKRLNRLYPQITPNQLKKICALSYTGWGRFSKKFLEEITAPDPETGEVWNIITALWESNNNLMQLLSNEYRFMEEVETYNMGKQTKTLSYETVENMYVSPSVKRQIWQTLKIVKELEKVMKESPKRVFIEMAREKQESKRTESRKKQLIDLYKACKNEEKDWVKELGDQEEQKLRSDKLYLYYTQKGRCMYSGEVIELKDLWDNTKYDIDHIYPQSKTMDDSLNNRVLVKKKYNATKSDKYPLNENIRHERKGFWKSLLDGGFISKEKYERLIRNTELSPEELAGFIERQIVETRQSTKAVAEILKQVFPESEIVYVKAGTVSRFRKDFELLKVREVNDLHHAKDAYLNIVVGNSYYVKFTKNASWFIKENPGRTYNLKKMFTSGWNIERNGEVAWEVGKKGTIVTVKQIMNKNNILVTRQVHEAKGGLFDQQIMKKGKGQIAIKETDERLASIEKYGGYNKAAGAYFMLVESKDKKGKTIRTIEFIPLYLKNKIESDESIALNFLEKGRGLKEPKILLKKIKIDTLFDVDGFKMWLSGRTGDRLLFKCANQLILDEKIIVTMKKIVKFIQRRQENRELKLSDKDGIDNEVLMEIYNTFVDKLENTVYRIRLSEQAKTLIDKQKEFERLSLEDKSSTLFEILHIFQCQSSAANLKMIGGPGKAGILVMNNNISKCNKISIINQSPTGIFENEIDLLKI

SEQ ID NO: 50 - protein, 984 aa, Campylobacter jejuni
MAKILAFDIGISSIGWAFSENDELKDCGVRIFTKAENPKTGESLALPRRIARSARKRLARRKARLNHLKHLIANEFKLNYEDYQSFDEILAKAYKGSLISPYELRFRALNELLSKQDFARVILHIAKRRGYDDIKNNGDEEKGKILKAIKQNEEKLANYQSVGEYLYKEYFQKFKENSKEFINVRNKKESYERCIAQSFLKDELKLIFKKQREFGFSFSKKFEEEVLSVAFYKRALKDFSHLVGNCSFFTDEKRAPKNSPLAFMFVALTRIINLLNNLKNTLYTKDDLNALLNEVLKNGTLTYKQTKKLLGLSDDYEFKGEKGNYFIEFKKYKEFIKALGEHSLSQDDLNEIAKDITLIKDEIKLKKALAKYDLNENQIDNLSKLEFKDHLNISFKALKLITPLMLEGKKYDEACNELTLKVAINEDKKDFLPAFNETYYKDEVTNPVVLRAIKEYRKVLNALLKKYGKVHKINIELAREVGKNHSQRAKIEKEQNENYKAKKDAELECEKLGLKINSKNILKLRLFKEQKEFCVYSGEKIKLSDLQDEKMLEIDHIYPYSRSFDDSYMNKVLVFTKQNQEKLNQTPFEAFGNDSAKWQKIEVLAKNLPTKKQKRILDKNYKDKEQKDFKDRNLNDTRYIARLVLNYTKDYLDFLPLSDDENTKLNDTQKGSKVHVEAKSGMLTSALRHTWGFSTKDRNNHLHHAIDAVIIAYANNSIVKAFSDFKKEQESNTAELYAKKISELDYKNKRKFFEPFSGFRQKVLDKIDEIFVSKPERKKPSGALHEETFRKEEEFYQSYGGKEGVLKALELGKIRKVNGKIVKNGDMFRVDIFKHKKTNKFYAVPIYTMDFALKVLPNKAVARSKKGEIKDWILMDENYEFCFSLYKDSLILIQTKDMQEPEFVYYNAFTSSTVSLIVSKHDNKFETLSKNQKILFKNANEKEVIAKSIGIQNLKVFEKYIVSALGEVTKAEFRQREEFKNELR

SEQ ID NO: 51 - protein, 1037 aa, Parvibaculum lavamentivorans
MERIFGFDIGTTSIGFSVIDYSSTQSAGNIQRLGVRIFPEARDPDGTPLNQQRRQKRMMRRQLRRRRIRRKALNETLHEAGFLPAYGSADWPVVMADEPYELRRRGLEEGLSAYEFGRAIYHLAQHRHFKGRELEESDTPDPDVDDEKEAANERAATLKALKNEQTTLGAWLARRPPSDRKRGIHAHRNVVAEEFERLWEVQSKFHPALKSEEMRARISDTIFAQRPVFWRKNTLGECRFMPGEPLCPKGSWLSQQRRMLEKLNNLAIAGGNARPLDAEERDAILSKLQQQASMSWPGVRSALKALYKQRGEPGAEKSLKFNLELGGESKLLGNALEAKLADMFGPDWPAHPRKQEIRHAVHERLWAADYGETPDKKRVIILSEKDRKAHREAAANSFVADFGITGEQAAQLQALKLPTGWEPYSIPALNLFLAELEKGERFGALVNGPDWEGWRRTNFPHRNQPTGEILDKLPSPASKEERERISQLRNPTVVRTQNELRKVVNNLIGLYGKPDRIRIEVGRDVGKSKREREEIQSGIRRNEKQRKKATEDLIKNGIANPSRDDVEKWILWKEGQERCPYTGDQIGFNALFREGRYEVEHIWPRSRSFDNSPRNKTLCRKDVNIEKGNRMPFEAFGHDEDRWSAIQIRLQGMVSAKGGTGMSPGKVKRFLAKTMPEDFAARQLNDTRYAAKQILAQLKRLWPDMGPEAPVKVEAVTGQVTAQLRKLWTLNNILADDGEKTRADHRHHAIDALTVACTHPGMTNKLSRYWQLRDDPRAEKPALTPPWDTIRADAEKAVSEIVVSHRVRKKVSGPLHKETTYGDTGTDIKTKSGTYRQFVTRKKIESLSKGELDEIRDPRIKEIVAAHVAGRGGDPKKAFPPYPCVSPGGPEIRKVRLTSKQQLNLMAQTGNGYADLGSNHHIAIYRLPDGKADFEIVSLFDASRRLAQRNPIVQRTRADGASFVMSLAAGEAIMIPEGSKKGIWIVQGVWASGQVVLERDTDADHSTTTRPMPNPILKDDAKKVSIDPIGRVRPSND

SEQ ID NO: 52 - protein, 1107 aa, Eubacterium ventriosum
MGYTVGLDIGVASVGVAVLDENDNIVEAVSNIFDEADTSNNKVRRTLREGRRTKRRQKTRIEDFKQLWETSGYIIPHKLHLNIIELRNKGLTELLSLDELYCVLLSMLKHRGISYLEDADDGEKGNAYKKGLAFNEKQLKEKMPCEIQLERMKKYGKYHGEFIIEINDEKEYQSNVFTTKAYKKELEKIFETQRCNGNKINTKFIKKYMEIYERKREYYIGPGNEKSRTDYGIYTTRTDEEGNFIDEKNIFGKLIGKCSVYPEEYRASSASYTAQEFNLLNDLNNLKINNEKLTEFQKKEIVEIIKDASSVNMRKIIKKVIDEDIEQYSGARIDKKGKEIYHTFEIYRKLKKELKTINVDIDSFTREELDKTMDILTLNTERESIVKAFDEQKFVYEENLIKKLIEFRKNNQRLFSGWHSFSYKAMLQLIPVMYKEPKEQMQLLTEMNVFKSKKEKYVNYKYIPENEVVKEIYNPVVVKSIRTTVKILNALIKKYGYPESVVIEMPRDKNSDDEKEKIDMNQKKNQEEYEKILNKIYDEKGIEITNKDYKKQKKLVLKLKLWNEQEGLCLYSGKKIAIEDLLNHPEFFEIDHIIPKSISLDDSRSNKVLVYKTENSIKENDTPYHYLTRINGKWGFDEYKANVLELRRRGKIDDKKVNNLLCMEDITKIDVVKGFINRNLNDTRYASRVVLNEMQSFFESRKYCNTKVKVIRGSLTYQMRQDLHLKKNREESYSHHAVDAMLIAFSQKGYEAYRKIQKDCYDFETGEILDKEKWNKYIDDDEFDDILYKERMNEIRKKIIEAEEKVKYNYKIDKKCNRGLCNQTIYGTREKDGKIHKISSYNIYDDKECNSLKKMINSGKGSDLLMYNNDPKTYRDMLKILETYSSEKNPFVAYNKETGDYFRKYSKNHNGPKVEKVKYYSGQINSCIDISHKYGHAKNSKKVVLVSLNPYRTDVYYDNDTGKYYLVGVKYNHIKCVGNKYVIDSETYNELLRKEGVLNSDENLEDLNSKNITYKFSLYKNDIIQYEKGGEYYTERFLSRIKEQKNLIETKPINKPNFQRKNKKGEWENTRNQIALAKTKYVGKLVTDVLGNCYIVNMEKFSLVVDK

SEQ ID NO: 53 - protein, 1136 aa, Streptococcus gordonii
MNGLVLGLDIGIASVGVGILEKDTGKIIHASSRLFPAATADNNVERRSNRQGRRLNRRKKHRSVRLQDLFEGYGLLTDFSKVSMNLNPYQLRVQGMENQLTNEELFVALKNIVKRRGISYLDDASEDGGTVSSDYGKAVEENRKLLAEKTPGQIQLERFEKYGQLRGDFTVEENGEKHRLINVFSTSAYRKEAERILRKQQEFNSKITDEFIEDYLIILTGKRKYYHGPGNEKSRTDYGRFRTDGTTLDNIFGILIGKCTFYTEEYRASKASYTAQEFNLLNDLNNLTVPTETKKLSEEQKKLIIEYAKSAKTLGASTLLKYIAKMIDASVDQIRGYRVDVNNKPEMHTFEVYRKMQSLETIKVEELPRKVLDELAHILTLNTEREGIEEAINSKLKDIFNRDQVLELVQFRKNNSSLFSKGWHNFSIKLMMELIPELYETSEEQMTILTRLGKQRSKETSKRTKYIDEKELTEEIYNPVVAKSVRQAIKIINEATKKYGIFDNIVIEMARENNEEDAKKDYIKRQKANQDEKNAAMEKAAFQYNGKKELPDNIFHGHKELTTKIRLWHQQGEKCLYTGKNIPISDLIHNQYKYEIDHILPLSLSFDDSLSNKVLVLATANQEKGQRTPFQALDSMDDAWSYREFKSYVKDSKLLSNKKKDYLLTEEDISKIEVKQKFIERNLVDTRYSSRVVLNALQDFYKSHQLDTTISVVRGQFTSQLRRKWGIEKSRETYHHHAVDALIIAASSQLRLWKKHSNPLIAYKEGQFVDSETGEIVSLSDEEYKELVFKAPYDHFVDTLRSKKFEDSILFSYQVDSKYNRKISDATIYATRKAKLDKEKKEYTYTLGKIKDIYALGTKTPSKTGFYKFLDLYKTDKSQFLMYQKDRKTWDEVIEKIIEQYRPFKEYDKNGKEVDFNPFEKYRIGNGPIRKYSKKGNGPEIKSLKYYDILLGKHKNITPDGSRNTVALLSLNPWRTDVYYNSETKKYEFLGLKYADLCFEEGGAYGISEVKYKKIREKEGIGKNSEFKFTLYKNDLILIKDTETNCQQFFRFWSRTGKDNPKSFEKHKIELKPYEKAKFEKGEELKVLGKVPPSSNQFQKNMQIENLSIYKVKTDILGNKHFIKKEGDEPKLKFKK

SEQ ID NO: 54 - protein, 984 aa, Campylobacter jejuni
MARILAFDIGISSIGWAFSENDELKDCGVRIFTKAENPKTGESLALPRRLARSARKRLARRKARLNHLKHLIANEFKLNYEDYQSFDESLAKAYKGSLISPYELRFRALNELLSKQDFARVILHIAKRRGYDDIKNNGDEEKSEILKAIKQNEEKLVNYQSVGEYLYKEYFQKFKENSKEFINVRNKKESYERCITQSFLKDELKLIFQKQREFGFSFSKKFEEEVLSVAFYKRALKDFSHLVGNCSFFTDEKRAPKNSPLAFMFVALTRIINILNNLKNTEGILYTKDDLNALLNEVLKNGTLTYKQTKKLLGLSDDYEFKGEKGTYFIEFKKYKEFIKALGEHNLSQDDLNEIAKDITLIKDEIKLKKALAKYDLNQNQIDSLSKLEFKDHLNISFKALKLITPLMLEGKKYDEACNELNLKVAINEDKKDFLPAFNETYYKDEVTNPVVLRAIKEYRKILNALLKKYGKVHKINIELAREVGKNHSQRAKIEKEQNENYKAKKDAEIECEKLGLKINSKNILKLRLFKEQKEFCAYSGEKIKLSDLQDEKMLEIDHIYPYSRSFDDSYMNKVLVFTKQNQEKLNKTPFEAFGNDSTKWQKIEVLAKNLPEKKQKRILDKNYKDKEQKDFKDRNLNDTRYIARLVLNYTKDYLDFLPLSDDENTKLNDTQKGSKVHVEAKSGMLTSALRHTWGFSAKDRNNHLHHAIDAAIIAYANNSIVKAFSDFKKEQESNSVELYAKKISELDYKNKRKFFEPFSGFRQKVLDKIDEIFVSKPERKKPSGALHEETFRKEEEFYQSYGGKEGVLKALELGKIRKVNGKIVKNGDMFRVDIFKHKKTNKFYAVPIYTMDFALKVLPNKAVARSKKGEIKDWILMDENYEFCFSLYKDSLILIQTKDMQEPELVYFNAFTSSTVSLIVSKHDNKFETLSKNQKILFKNANEKEVIAKSIGIQNLKVFEKYIVSALGEVTKAEFRQREDFKK

SEQ ID NO: 55 - protein, 1079 aa, Dinoroseobacter shibae
MRLGLDIGTSSIGWWLYETDGAGSDARITGVVDGGVRIFSDGRDPKSGASLAVDRRAARAMRRRRDRYLRRRATLMKVLAETGLMPADPAEAKALEALDPFALRAAGLDEPLPLPHLGRALFHLNQRRGFKSNRKTDRGDNESGKIKDATARLDMEMMANGARTYGEFLHKRRQKATDPRHVPSVRTRLSIANRGGPDGKEEAGYDFYPDRRHLEEEFHKLWAAQGAHHPELTETLRDLLFEKIFFQRPLKEPEVGLCLFSGHHGVPPKDPRLPKAHPLTQRRVLYETVNQLRVTADGREARPLTREERDQVIHALDNKKPTKSLSSMVLKLPALAKVLKLRDGERFTLETGVRDAIACDPLRASPAHPDRFGPRWSILDADAQWEVISRIRRVQSDAEHAALVDWLTEAHGLDRAHAEATAHAPLPDGYGRLGLTATTRILYQLTADVVTYADAVKACGWHHSDGRTGECFDRLPYYGEVLERHVIPGSYHPDDDDITRFGRITNPTVHIGLNQLRRLVNRIIETHGKPHQIVVELARDLKKSEEQKRADIKRIRDTTEAAKKRSEKLEELEIEDNGRNRMLLRLWEDLNPDDAMRRFCPYTGTRISAAMIFDGSCDVDHILPYSRTLDDSFPNRTLCLREANRQKRNQTPWQAWGDTPHWHAIAANLKNLPENKRWRFAPDAMTRFEGENGFLDRALKDTQYLARISRSYLDTLFTKGGHVWVVPGRFTEMLRRHWGLNSLLSDAGRGAVKAKNRTDHRHHAIDAAVIAATDPGLLNRISRAAGQGEAAGQSAELIARDTPPPWEGFRDDLRVRLDRIIVSHRADHGRIDHAARKQGRDSTAGQLHQETAYSIVDDIHVASRTDLLSLKPAQLLDEPGRSGQVRDPQLRKALRVATGGKTGKDFENALRYFASKPGPYQAIRRVRIIKPLQAQARVPVPAQDPIKAYQGGSNHLFEIWRLPDGEIEAQVITSFEAHTLEGEKRPHPAAKRLLRVHKGDMVALERDGRRVVGHVQKMDIANGLFIVPHNEANADTRNNDKSDPFKWIQIGARPAIASGIRRVSVDEIGRLRDGGTRPI

SEQ ID NO: 56 - protein, 1096 aa, Eubacterium dolichum
MMEVFMGRLVLGLDIGITSVGFGIIDLDESEIVDYGVRLFKEGTAAENETRRTKRGGRRLKRRRVTRREDMLHLLKQAGIISTSFHPLNNPYDVRVKGLNERLNGEELATALLHLCKHRGSSVETIEDDEAKAKEAGETKKVLSMNDQLLKSGKYVCEIQKERLRTNGHIRGHENNFKTRAYVDEAFQILSHQDLSNELKSAIITIISRKRMYYDGPGGPLSPTPYGRYTYFGQKEPIDLIEKMRGKCSLFPNEPRAPKLAYSAELFNLLNDLNNLSIEGEKLTSEQKAMILKIVHEKGKITPKQLAKEVGVSLEQIRGFRIDTKGSPLLSELTGYKMIREVLEKSNDEHLEDHVFYDEIAEILTKTKDIEGRKKQISELSSDLNEESVHQLAGLTKFTAYHSLSFKALRLINEEMLKTELNQMQSITLFGLKQNNELSVKGMKNIQADDTAILSPVAKRAQRETFKVVNRLREIYGEFDSIVVEMAREKNSEEQRKAIRERQKFFEMRNKQVADIIGDDRKINAKLREKLVLYQEQDGKTAYSLEPIDLKLLIDDPNAYEVDHIIPISISLDDSITNKVLVTHRENQEKGNLTPISAFVKGRFTKGSLAQYKAYCLKLKEKNIKTNKGYRKKVEQYLLNENDIYKYDIQKEFINRNLVDTSYASRVVLNTLTTYFKQNEIPTKVFTVKGSLTNAFRRKINLKKDRDEDYGHHAIDALIIASMPKMRLLSTIFSRYKIEDIYDESTGEVFSSGDDSMYYDDRYFAFIASLKAIKVRKFSHKIDTKPNRSVADETIYSTRVIDGKEKVVKKYKDIYDPKFTALAEDILNNAYQEKYLMALHDPQTFDQIVKVVNYYFEEMSKSEKYFTKDKKGRIKISGMNPLSLYRDEHGMLKKYSKKGDGPAITQMKYFDGVLGNHIDISAHYQVRDKKVVLQQISPYRTDFYYSKENGYKFVTIRYKDVRWSEKKKKYVIDQQDYAMKKAEKKIDDTYEFQFSMHRDELIGITKAEGEALIYPDETWHNFNFFFHAGETPEILKFTATNNDKSNKIEVKPIHCYCKMRLMPTISKKIVRIDKYATDVVGNLYKVKKNTLKFEFD

SEQ ID NO: 57 - protein, 1082 aa, Neisseria meningitidis
MAAFKPNPINYILGLDIGIASVGWAMVEIDEDENPICLIDLGVRVFERAEVPKTGDSLAMARRLARSVRRLTRRRAHRLLRARRLLKREGVLQAADFDENGLIKSLPNTPWQLRAAALDRKLTPLEWSAVLLHLIKHRGYLSQRKNEGETADKELGALLKGVADNAHALQTGDFRTPAELALNKFEKESGHIRNQRGDYSHTFSRKDLQAELNLLFEKQKEFGNPHISDGLKEGIETLLMTQRPALSGDAVQKMLGHCTFEPAEPKAAKNTYTAERFIWLTKLNNLRILEQGSERPLTDTERTTLIDEPYRKSKLTYAQARKLLELDNTAFFKGLRYGKDNAEASTLMEMKAYHAISRALEKEGLKDKKSPLNLSPELQDEIGTAFSLFKTDEDITGRLKDRVQPEILEALLKHISFDKFVQISLKALRRIVPLMEQGKRYDEACAEIYGDHYGKKNTEEKIDLPPIPADEIRNPVVLRALSQARKVINGVVRRYGSPARIHIETAREVGKSFKDRKEIEKRQEENRKDREKAATKFREYFPNFVGEPKSKDILKLRLYEQQHGKCLYSGKEINLGRLNEKGYVEIDHALPFSRTWDDSFNNKVLVLGSENQNKGNQTPYEYFNGKDNSREWQEFKARVETSRFPRSKKQRILLQKFDEEGFKERNLNDTRYVNRFLCQFVADHMLLTGKGKRRVFASNGQITNLLRGFWGLRKVRAENDRHHALDAVVVACSTVAMQQKITRFVRYKEMNAFDGKTIDKETGEVLHQKTHFPQPWEFFAQEVMIRVFGKPDGKPEFEEADTPEKLRTLLAEKLSSRPEAVHEYVTPLFVSRAPNRKMSGQGHMETVKSAKRLDEGVSVLRVPLTQLKLKDLEKMVNREREPKLYEALKARLEAHKDDPAKAFAEPFYKYDKAGNRTQQVKAVRVEQVQKTGVWVRNHNGIADNATMVRVDVFEKGDKYYLVPIYSWQVAKGILPDRAVVQGKDEEDWQLIDDSFNFKFSLHPNDLVEVITKKARMFGYFASCHRGTGNINIRIHDLDHKIGKNGILEGIGVKTALSFQKYQIDELGKEIRPCRLKKRPPVR

SEQ ID NO: 58 - protein, 1050 aa, Gluconacetobacter diazotrophicus
MGENMIDESLTFGIDLGIGSCGWAVLRRPSAFGRKGVIEGMGSWCFDVPETSKERTPTNQIRRSNRLLRRVIRRRRNRMAAIRRLLHAAGLLPSTDSDALKRPGHDPWELRARGLDKPLKPVEFAVVLGHIAKRRGFKSAAKRKATNISSDDKKMLTALEATRERLGRYRTVGEMFARDPDFASRRRNREGKYDRTTARDDLEHEVHALFAAQRRLGQGFASPELEEAFTASAFHQRPMQDSERLVGFCPFERTEKRAAKLTPSFERFRLLARLLNLRITTPDGERPLTVDEIALVTRDLGKTAKLSIKRVRTLIGLEDNQRFTTIRPEDEDRDIVARTGGAMTGTATLRKALGEALWTDMQERPEQLDAIVQVLSFFEANETITEKLREIGLTLAVLDVLLTALDAGVFAKFKGAAHISTKAARNLLPHLEQGRRYDEACTMAGYDHAASRLSHHGQIVAKTQFNALVTEIGESIANPIARKALIEGLKQIWAMRNHWGLPGSIHVELARDVGNSIEKRREIEKHIEKNTALRARERREVHDLLDLEDVNGDTLLRYRLWKEQGGKCLYTGKAIHIRQIAATDNSVQVDHILPWSRFGDDSFNNKTLCLASANQQKKRSTPYEWLSGQTGDAWNAFVQRIETNKELRGFKKRNYLLKNAKEAEEKFRSRNLNDTRYAARLFAEAVKLLYAFGERQEKGGNRRVFTRPGALTAALRQAWGVESLKKQDGKRINDDRHHALDALTVAAVDEAEIQRLTKSFHEWEQQGLGRPLRRVEPPWESFRADVEATYPEVFVARPERRRARGEGHAATIRQVKERECTPIVFERKAVSSLKEADLERIKDGERNEAIVEAIRSWIATGRPADAPPRSPRGDIITKIRLATTIKAAVPVRGGTAGRGEMVRADVFSKPNRRGKDEWYLVPVYPHQIMNRKAWPKPPMRSIVANKDEDEWTEVGPEHQFRFSLYPRSNIEIIRPSGEVIEGYFVGLHRNTGALTISAHNDPKSIHSGIGTKTLLAISKYQVDRFGRKSPVRKEVRTWHGEACISPTPPG

SEQ ID NO: 59 - protein, 1391 aa, Kordia algicida
MKKILGLDLGTNSIGWALVNEAEHEHEQSSIVKLGVRVNPLSVDEKTNFEKGRPLSINADRTSKRSARRNLQRFKLRRKNLINLLLKHHIISNETILTEVGKNTTHQTLKLRSKATQEKISLEEFARILLSINKKRGYKSSRKEKNEDEGFTIDGMAIAKELYDNQLTPGQYVYNILQDGKNYIPDFYRSDLQAEFDDVWQFQKKFYSSILTDEFYLKLKGQGKENTRKLFLAIHQVYTAENKGKRDAVKLQYYKWRSEAVKKQLSIEEVAYVLVEINNNINKSSGYLGAISDRSKALYFNNETVGEYLYGQLVKNRHNSLRNQVFYRQDYLDEFEKIWETQAKFYDELTNELKQEIRDVVIFYQRKLKSQKHLISDCLFEKHHKAIPKSSPLFQEFKIWQNLNYLEFVHTQSKEKIFFSELDDETRQFVFAELNIRGTLKIKEIKKLIGLETPVYWKSNFDEIEGNRTNQVLYNVYQNIADDLGYGFDWSKKHAFEINAELQAIFKDVGIDTAILNFDASIEENDFDKQKSYQLWHLLYSAEDTDKATEEDKLIYGNINTKLKKQLHQKYGFEAKYGNLLANISLQQDYGNLSAKAIKKILPYLESGNSFYEACTIVGYNPSNSLTKEQQQNRKLKDKLELLPKNSLRNPVVEKILNQKVNLINQLIDEYGKPDEVRIELARELKKSAKQRADLSKHINDATLKNQNIRKTLQKDFGIQNPSKNDVIRYKLYDELKDNGYKTLFTNKYIPKEQLFSKDVDIEHIIPKAILFDDSFSNKTLAYRNVNLAKADATAFDFISSKHLDDLDNYKARVETLFQSKRISKGKYKKLLMTRQNLPEDFIERDLRNSQYIAKKATAMLKEVFRSVVPTSGRITDKLREDWDLVNVMKELNLPKYRTLGLTEFIERKNGNKIEQIIDWTKRNDHRHHAMDALTVAFTTHNHIQYLNNLNVTHGLNGVDTDHEKSRLYAIKQAITKVYIVGKTKKRKFIPPMENFRSHAKNHLEGILISFKNKNKVVTKNKNRTKTKTKGVFNEKIQLTPRGQLHKETIYGHAKKVIVTKEKVSSKFTHEKILQVTKPAYREALLKRLASFKNDPKKAFSGKNALSKNPLYFDITSGKKVPDTVKLSYFENSYVIRKEVNSDNFKNEKSLQKVLDVGIRRILEKRLADYNGNAKEAFSNLEKNPIWKDKEKGVCIKKVRIEALKNAEPLHVKKDHLGKIILDDENKSTPVDFISTGNNHHVAIYEDKDGKLHDKVVSFYEVVSRVNLGLPIIDKSFNSHLDWKFLFSMKQNEMFVFPSEDFNPKEIDIGNPKNNELISKYLFRVQKFSKVTYGNSAVRDYVFRHHLETELIDKKELKGITYYQLKSIGMLEKLVKVRINHIGKIVHIGEY

SEQ ID NO: 60 - protein, 1116 aa, Clostridium spiroforme
MVEFLLKEMKIMGRLVLGLDIGITSVGYGVIDIDKNEFVDYGVRLFKEGTAINNEERRSKRGARRLKRRKTNRIADMKKLLERNGLIDEQYTALNNPYEIRKKGLKNKLSNYELATAILHITKNRGTCLESNADETQDEESTKNILSKNALELKDKYICEIQLARLEESGKIRGINNNFKTEDYLKELSKILENQDLEKETIDKIKEIVARRRRYDQGPGSEKSPTPYGSYRMENGELVHVNLIDMMRGKCSVFPDQLRAPQQSYSAELFNLLNDLNNLKINGEKLSSTEKQKIIDFVNEKGGITVKQLLKLIDVGITEISGFRIDKNEKPLITEFKGYKKVLKVFKNYNQESLLNDKSIVDTIMDINTKIKSIDERSDQLKQVLPSLDTSIINDLASIKGVSGYHSLSLKALNLINNEMLKTEMNQMQVLHQLDIFDKNRVSLKGQRQIYADDNAILSPVAKRAHRETFKVINKLRSIYGEFDSIVIETTRDKNTQDQKKRIKNNQKNYEERNTEVNNFLKEAGYNPENINAKTKMKIRLYIEQDAKSAYTLQDINLKELIEDEKAYEIDHIIPISISLDDSFNNKVLTTHDENQEKGNLTPISAFLKGKFHNGNLNTYKVFIQNNKNLNRKKKEYLLCEDDITRYEVVQNFINRNLVDTSYACRTVMNTLVHYFKDNEINTKVHTIKGQATSTFRKRIGLIKDREEDYFHHAIDALIVASLKKMNLINSYLMKVDFNEMYDEETGEIFNVLPDNSYLDEKYISFVSNLKNIYEESNKYIRGVMIKEKMTYPLIKVSHKIDTKPNRKISDDTIYSTRNVDNQDMLVERIKNIYDPKENAANTLINDIINDNTDKYIMYHKDPQTFDKIKAIVLNHFNEFKTDKNCYIVTKEGLYKLKGTSPLALYYEEFGPITKYAKKNNGPTIHSMKFYSEKLGNHLSITHKYSTVNKKVITKQISPYRTDFYQSPEGKYKFVTVRYKDVAYNAKKDKYIIDHSWYREQKKLKKIADEWIFVCSVHRDELIGIMKADGQKRIFDSSTESDGETLYHDAKTYEILKFTATNNDITGRFEVKPIYCYCKKQLMVSIGTCRKIQKFATDVLGNLYIVKDNVLKLEFK

SEQ ID NO: 61 - protein, 1348 aa, Finegoldia magna
MKSEKKYYIGLDVGTNSVGWAVTDEFYNILRAKGKDLWGVRLFEKADTAANTRIFRSGRRRNDRKGMRLQILREIFEDEIKKVDKDFYDRLDESKFWAEDKKVSGKYSLFNDKNFSDKQYFEKFPTIFHLRKYLMEEHGKVDIRYYFLAINQMMKRRGHFLIDGQISHVTDDKPLKEQLILLINDLLKIELEEELMDSIFEILADVNEKRTDKKNNLKELIKGQDFNKQEGNILNSIFESIVTGKAKIKNIISDEDILEKIKEDNKEDFVLTGDSYEENLQYFEEVLQENITLFNTLKSTYDFLILQSILKGKSTLSDAQVERYDEHKKDLEILKKVIKKYDEDGKLFKQVFKEDNGNGYVSYIGYYLNKNKKITAKKKISNIEFTKYVKGILEKQCDCEDEDVKYLLGKIEQENFLLKQISSINSVIPHQIHLFELDKILENLAKNYPSFNNKKEEFTKIEKIRKTFTFRIPYYVGPLNDYHKNNGGNAWIFRNKGEKIRPWNFEKIVDLHKSEEEFIKRMLNQCTYLPEETVLPKSSILYSEYMVLNELNNLRINGKPLDTDVKLKLIEELFKKKTKVTLKSIRDYMVRNNFADKEDFDNSEKNLEIASNMKSYIDFNNILEDKFDVEMVEDLIEKITIHTGNKKLLKKYIEETYPDLSSSQIQKIINLKYKDWGRLSRKLLDGIKGTKKETEKTDTVINFLRNSSDNLMQIIGSQNYSFNEYIDKLRKKYIPQEISYEVVENLYVSPSVKKMIWQVIRVTEEITKVMGYDPDKIFIEMAKSEEEKKTTISRKNKLLDLYKAIKKDERDSQYEKLLTGLNKLDDSDLRSRKLYLYYTQMGRDMYTGEKIDLDKLFDSTHYDKDHIIPQSMKKDDSIINNLVLVNKNANQTTKGNIYPVPSSIRNNPKIYNYWKYLMEKEFISKEKYNRLIRNTPLTNEELGGFINRQLVETRQSTKAIKELFEKFYQKSKIIPVKASLASDLRKDMNTLKSREVNDLHHAHDAFLNIVAGDVWNREFTSNPINYVKENREGDKVKYSLSKDFTRPRKSKGKVIWTPEKGRKLIVDTLNKPSVLISNESHVKKGELFNATIAGKKDYKKGKIYLPLKKDDRLQDVSKYGGYKAINGAFFFLVEHTKSKKRIRSIELFPLHLLSKFYEDKNTVLDYAINVLQLQDPKIIIDKINYRTEIIIDNFSYLISTKSNDGSITVKPNEQMYWRVDEISNLKKIENKYKKDAILTEEDRKIMESYIDKIYQQFKAGKYKNRRTTDTIIEKYEIIDLDTLDNKQLYQLLVAFISLSYKTSNNAVDFTVIGLGTECGKPRITNLPDNTYLVYKSITGIYEKRIRIK

SEQ ID NO: 62 - protein, 1129 aa, Streptococcus infantarius
MSNGKILGLDIGVASVGVGIIDSKTGNVIHANSRLFSAANAENNAERRGFRGARRLTRRKKHRVKRVRDLFEKYDISTDFRNLNLNPYELRVKGLTEQLTNEELFAALRTIAKRRGISYLDDAEDDSTGSSDYAKSIDENRRLLKTKTPGQIQLERLEKYGQLRGNFTVYDENGEAHRLINVFSTSDYKNEARKILETQSNYNKQITDEFIEDYIEILTQKRKYYHGPGNEKSRTDYGRFRTDGTTLENIFGILIGKCSFYPEEYRASKASYTAQEFNFLNDLNNLKVPTETGKLSTEQKEYLVDFAKKSKALGASKLLKEIAKIVDCSVDDIKGYRVDNKDKPDLHTFEPYRKLKFNLSSIDIDELSRETLDKLADILTLNTEREGIEDAIKRNLPSQFTEEQISEIVQIRKNQSSAFNKGWHSFSAKLMNELIPELYVTSEEQMTILTRLEKFKVNKKSSKNTKTIDEKEITDEIYNPVVAKSVRQTIKIINAAVKKYGDFDKIVIEMPRDKNAEDEKKFIDKKQKENKKEKDDSLKRAAFLYNGTDNLPDGVFHGNKELKTKIRLWYQQGERCLYSGKLISIHDLVHNSNKFEIDHILPLSLSFDDSLANKVLVYAWTNQEKGQKTPYQVIDSMDTAWSFREMKDYVLKQKGLGKKKCEYLLTTENIDKIEVKKKFIERNLVDTRYASRVVLNSLQTALKELGKDTKVSVVRGQFTSQLRRKWNIDKSRETYHHHAVDALIIAASSQLKLWQKQENPMFESYGENQVVNKETGEILSISDDKYKELVFQPPYQGFVNTISSKGFEDEILFSYQVDSKFNRKVSDATIYSTRKAKLGKDKKDETYVLGKIKDIYSQDGFDTFIKRYKKDKTQFLMYQKDPLTWENVIEVILRDYPSEKLSEDGKKTVKCNPFEEYRRENGLICKYSKKGNGTPIKSLKYYDKKLGNCIDITPEKSKNRVVLRQISPWRADIYFNLETLKYELMGLKYSDLSFEKGTGKYHISQEKYDAIREKEGIGKKSEFKFTLYRNDLILIKDTLNNCERMLRFGSKNDTSKHYVELKPLEKGTFDSEEEILPVLGKVAKSGQFIKGLNKPNISIYKVRTDVLGNKFFIKKEGDKPKLDFKNNNK

SEQ ID NO: 63 - protein, 1065 aa, Clostridium perfringens
MNKDINYALGLDIGITSVGWAVINLDLNRIEDLGVRIFNAAENLKDGSSLALPRRLARGRRRLLRRKAYRVERVRKLILKNNILTKEELEGLFKNKEVIDVWEARVKGLDYKLSREEWAKILINFCKRRGFKSNRKNEAKDKEAGQILSSISYNIEKMKETNSRTIGEYIYNEVKNSEDSYAPLRNKFGEYKMCVSRDVIREEIHTLFEKQRELGNNFASDEIEDKYFEIFNSQRPFSNFEDLEKLVGFCTFERKKHKRAPKHCISSEEFTLYEGINKLSIIKDGEKRKLSEEERTLVVNEAFNKKEIKYTTLRKLLGLSEEELFSTLTYSIDKDISKTENTKFVSLKGYHEIKRAIEKGVSKKAWQDIENNRNLLNDIAYVLTLGKTDDEIEKQLRLRNVPEELFESLLDMSFNKFNNLSIYALEKILPFMKEGYQYNEACEKAGYNFKAIYEGVRTKKLPVIEIDEIVNPVVNRALAQTRKVINSVIDKYGSPVRINIELARDLAKNFKDRKLIEKEQKENRANLDKIRENLRELMDKEPTVVEVLKYRLWEQQRGECAYTQSQIPLERLFSPGYCEIDHIIPFSRSFDDSLSNKILVLGSENQRKGNRTPYEYFGEDSERWNSFEIWVKGSYLNYKKKANLLKKKFSEEEQRDWKARNLQDTKYICRYISNFVNNRLEFKESENKQKVITVNGRATAYLRSRWGLNKVREDGDKHHALDAAVVGVTTQGMVQKISKYSKAHELYTVRKNDEFVDVETGECVDVDEYKEIRKDILPRPWRGFSEELKLRLSDNPLEELKKSPIETYNEEFIKENVKPIFVSRVPFRKISGKLFKETIYSERAFKDGYFVSKKSLVDLKRGDLDNFYNYECDKKLYDAISERMKEFNYNGKKAFESPFRKPTKSGKEGPVVRSVKIKSAVPFKDGIPMNEGLVAKEGMVRIDIYEKEGKYFVVPVYRYQLAKGIVPKRAAIAKKDELKWPIMDQTYNFKFSIYKNDLIEVKYDKKGVYFGYYDGFDRNSASLTIEKHDNSERYRSIGLKVGVLEINKYEVDVLGNYHKVKLGGN

SEQ ID NO: 64 - protein, 1195 aa, Elusimicrobium minutum
MQKNINTKQNHIYIKQAQKIKEKLGDKPYRIGLDLGVGSIGFAIVSMEENDGNVLLPKEIIMVGSRIFKASAGAADRKLSRGQRNNHRHTRERMRYLWKVLAEQKLALPVPADLDRKENSSEGETSAKRFLGDVLQKDIYELRVKSLDERLSLQELGYVLYHIAGHRGSSAIRTFENDSEEAQKENTENKKIAGNIKRLMAKKNYRTYGEYLYKEFFENKEKHKREKISNAANNHKFSPTRDLVIKEAEAILKKQAGKDGFHKELTEEYIEKLTKAIGYESEKLIPESGFCPYLKDEKRLPASHKLNEERRLWETLNNARYSDPIVDIVTGEITGYYEKQFTKEQKQKLFDYLLTGSELTPAQTKKLLGLKNTNFEDIILQGRDKKAQKIKGYKLIKLESMPFWARLSEAQQDSFLYDWNSCPDEKLLTEKLSNEYHLTEEEIDNAFNEIVLSSSYAPLGKSAMLIILEKIKNDLSYTEAVEEALKEGKLTKEKQAIKDRLPYYGAVLQESTQKIIAKGFSPQFKDKGYKTPHTNKYELEYGRIANPVVHQTLNELRKLVNEIIDILGKKPCEIGLETARELKKSAEDRSKLSREQNDNESNRNRIYEIYIRPQQQVIITRRENPRNYILKFELLEEQKSQCPFCGGQISPNDIINNQADIEHLFPIAESEDNGRNNLVISHSACNADKAKRSPWAAFASAAKDSKYDYNRILSNVKENIPHKAWRFNQGAFEKFIENKPMAARFKTDNSYISKVAHKYLACLFEKPNIICVKGSLTAQLRMAWGLQGLMIPFAKQLITEKESESFNKDVNSNKKIRLDNRHHALDAIVIAYASRGYGNLLNKMAGKDYKINYSERNWLSKILLPPNNIVWENIDADLESFESSVKTALKNAFISVKHDHSDNGELVKGTMYKIFYSERGYTLTTYKKLSALKLTDPQKKKTPKDFLETALLKFKGRESEMKNEKIKSAIENNKRLFDVIQDNLEKAKKLLEEENEKSKAEGKKEKNINDASIYQKAISLSGDKYVQLSKKEPGKFFAISKPTPTTTGYGYDTGDSLCVDLYYDNKGKLCGEIIRKIDAQQKNPLKYKEQGFTLFERIYGGDILEVDFDIHSDKNSFRNNTGSAPENRVFIKVGTFTEITNNNIQIWFGNIIKSTGGQDDSFTINSMQQYNPRKLILSSCGFIKYRSPILKNKEG

SEQ ID NO: 65 - protein, 1101 aa, Akkermansia muciniphila
MSRSLTFSFDIGYASIGWAVIASASHDDADPSVCGCGTVLFPKDDCQAFKRREYRRLRRNIRSRRVRIERIGRLLVQAQIITPEMKETSGHPAPFYLASEALKGHRTLAPIELWHVLRWYAHNRGYDNNASWSNSLSEDGGNGEDTERVKHAQDLMDKHGTATMAETICRELKLEEGKADAPMEVSTPAYKNLNTAFPRLIVEKEVRRILELSAPLIPGLTAEIIELIAQHHPLTTEQRGVLLQHGIKLARRYRGSLLFGQLIPRFDNRIISRCPVTWAQVYEAELKKGNSEQSARERAEKLSKVPTANCPEFYEYRMARILCNIRADGEPLSAEIRRELMNQARQEGKLTKASLEKAISSRLGKETETNVSNYFTLHPDSEEALYLNPAVEVLQRSGIGQILSPSVYRIAANRLRRGKSVTPNYLLNLLKSRGESGEALEKKIEKESKKKEADYADTPLKPKYATGRAPYARTVLKKVVEEILDGEDPTRPARGEAHPDGELKAHDGCLYCLLDTDSSVNQHQKERRLDTMTNNHLVRHRMLILDRLLKDLIQDFADGQKDRISRVCVEVGKELTTFSAMDSKKIQRELTLRQKSHTDAVNRLKRKLPGKALSANLIRKCRIAMDMNWTCPFTGATYGDHELENLELEHIVPHSFRQSNALSSLVLTWPGVNRMKGQRTGYDFVEQEQENPVPDKPNLHICSLNNYRELVEKLDDKKGHEDDRRRKKKRKALLMVRGLSHKHQSQNHEAMKEIGMTEGMMTQSSHLMKLACKSIKTSLPDAHIDMIPGAVTAEVRKAWDVFGVFKELCPEAADPDSGKILKENLRSLTHLHHALDACVLGLIPYIIPAHHNGLLRRVLAMRRIPEKLIPQVRPVANQRHYVLNDDGRMMLRDLSASLKENIREQLMEQRVIQHVPADMGGALLKETMQRVLSVDGSGEDAMVSLSKKKDGKKEKNQVKASKLVGVFPEGPSKLKALKAAIEIDGNYGVALDPKPVVIRHIKVFKRIMALKEQNGGKPVRILKKGMLIHLTSSKDPKHAGVWRIESIQDSKGGVKLDLQRAHCAVPKNKTHECNWREVDLISLLKKYQMKRYPTSYTGTPR

SEQ ID NO: 66 - protein, 1187 aa, Bifidobacterium longum
MLSRQLLGASHLARPVSYSYNVQDNDVHCSYGERCFMRGKRYRIGIDVGLNSVGLAAVEVSDENSPVRLLNAQSVIHDGGVDPQKNKEAITRKNMSGVARRTRRMRRRKRERLHKLDMLLGKFGYPVIEPESLDKPFEEWHVRAELATRYIEDDELRRESISIALRHMARHRGWRNPYRQVDSLISDNPYSKQYGELKEKAKAYNDDATAAEEESTPAQLVVAMLDAGYAEAPRLRWRTGSKKPDAEGYLPVRLMQEDNANELKQIFRVQRVPADEWKPLFRSVFYAVSPKGSAEQRVGQDPLAPEQARALKASLAFQEYRIANVITNLRIKDASAELRKLTVDEKQSIYDQLVSPSSEDITWSDLCDFLGFKRSQLKGVGSLTEDGEERISSRPPRLTSVQRIYESDNKIRKPLVAWWKSASDNEHEAMIRLLSNTVDIDKVREDVAYASAIEFIDGLDDDALTKLDSVDLPSGRAAYSVETLQKLTRQMLTTDDDLHEARKTLFNVTDSWRPPADPIGEPLGNPSVDRVLKNVNRYLMNCQQRWGNPVSVNIEHVRSSFSSVAFARKDKREYEKNNEKRSIFRSSLSEQLRADEQMEKVRESDLRRLEAIQRQNGQCLYCGRTITFRTCEMDHIVPRKGVGSTNTRTNFAAVCAECNRMKSNTPFAIWARSEDAQTRGVSLAEAKKRVTMFTFNPKSYAPREVKAFKQAVIARLQQTEDDAAIDNRSIESVAWMADELHRRIDWYFNAKQYVNSASIDDAEAETMKTTVSVFQGRVTASARRAAGIEGKIHFIGQQSKTRLDRRHHAVDASVIAMMNTAAAQTLMERESLRESQRLIGLMPGERSWKEYPYEGTSRYESFHLWLDNMDVLLELLNDALDNDRIAVMQSQRYVLGNSIAHDATIHPLEKVPLGSAMSADLIRRASTPALWCALTRLPDYDEKEGLPEDSHREIRVHDTRYSADDEMGFFASQAAQIAVQEGSADIGSAIHHARVYRCWKTNAKGVRKYFYGMIRVFQTDLLRACHDDLFTVPLPPQSISMRYGEPRVVQALQSGNAQYLGSLVVGDEIEMDFSSLDVDGQIGEYLQFFSQFSGGNLAWKHWVVDGFFNQTQLRIRPRYLAAEGLAKAFSDDVVPDGVQKIVTKQGWLPPVNTASKTAVRIVRRNAFGEPRLSSAHHMPCSWQWRHE

SEQ ID NO: 67 - protein, 166 aa, Unknown
  Description of Unknown: uncultured Termite sequence
MNKVQEIEYKKIREKLADREYRIGLDLGVGSIGYVVVSLKECNDLSYLPEDIILSGSRIFKSSIGAVERREFRLQRNSHRHHRERMRFLWQLLAEKQLALQSSKDLEKKENSADCETSQKRFPINILKEDPYILRYKALEEKLSLFQLGYVLYHIANHSNTAYENT

SEQ ID NO: 68 - protein, 1032 aa, Unknown
  Description of Unknown: uncultured Termite sequence
MLYHIANHRGTDSVRSFLEYDDDKIKENTLTAKIAKETKKVIDAKKYRTFGEYLYKGKIEKFQQNIRKKVSNRKTPANKNKEFAVTRDVIIKETEKILASQKQYYTYILTDEYIKKIKDAISYQTEKLIPESGYCPYFKDEKRLPRSHKLNEYRRMYEALNNAKYFDPVLDENTGEILSYQEKEFSREEKKILFDEVLLKGMELTESGAKKLLYHLPDGCEVQLQGRDKTTQKIKGYALVDLEASPFWLRLSQQQQDEFLYDWNSLPLEKLKPKLTNYYSLTESEVDETFQEIKLPSNYASVGKKAMEILLTYIKDGCSYTEALEKAVSEGKLKVDKQTMIYDSLPYYGKILKESTQKLIGKAFSKQFADRNYKEPDTNKNEREFGKIANPVVHQTLNELRKLINEIITVFGKKPLEIGLETTRELKKSKKNREYLSKQQNKNEYARNRIYKEYIEPHLSQIKSRQENPSKYISKFELLEEQNFICPFCSEKITPDDIINSKVDVEHIFPIEESEDITKNNLVIAHNECNADKGKKSPFDAFGDKTSGKYRWNCILHNAQKNLPHKVWRFYQGSLEKFLENKPMSRRFGTDNSYISKIAARYLACLFNDPYHSEIFCIKSSLIAQLRIAWDLNSIMVPLVKNILSEKELEEFKISKNKKIRIDNRHHALDAIVIAYANRGYHNFLNRIHAKEYKINYREKSWLSKILLPPLNRDLEDFKISVKDSIEKANVSIKHDHNTNGSLVKATAYKVYYSGAGEYIITTSKNVEEISFKEKEDPKDTLYRALCKFECRDIDIKDEKLIKKLKYNSTLYKKVQNNLSKAKQELEQDNKKTEEEGKKSQKITEVRIYKKACSLVKGQYIQCGSRLKDKFFAVKEPTEIKTGLGYDTGDNLFLDLYYDKTGKLCGEIIRKVNFNRNKPNYQKEGYTLFERIYQSDILEVDTSEDRISLKNKTGSAPSDRTFIKVNTFTEVNAYFDGKRDKIQIFFGNLLKSSFKNDSFFISSMQKYNVRKVILTSLGIIKYRSQILKNKEV

SEQ ID NO: 69 - protein, 1032 aa, Unknown
  Description of Unknown: uncultured Termite sequence
MKKRILGLDIGIASVGWALVEFDDEFQDNKKKGTIIKSGVRIFTRAETPKERESLAKPRREARSQRRRIRRRVERLNSIRELFVKNGVVEEWSVSKKNPNNIYITLNQIKTPWQLRMESLDRKLTNEQFAVVLTHLAKHRGYKSLRKDDKAGKVLEAISQNKKRLNDSDYRTLGEMFCKNESYKEHKRNKGGEYINSVARELIEEEVEKIFVKQREKGNNFADVNTEREYLKIAFSQKPAGSISKMVGFCTFENGEKRAPRDSYSAELFKVLCTINNTTFTDMKTGEIRSFSKEEIGKTLETVKNVKDVKYAKIRKDLGLEDSVKFSGVDYRENAKSKGEGEIFVSMKTYHEIKSKIEKLSKEKWDNLKGNTELLDSIVNIIANLKDDESIKKEFQKLKIDEDIIDVLLNFEFKKFINLSFKALRKIIPFQFQGQKYITASTSAGYSLKQEGIKNKLVPPAKENINVAVVARAFAQTRKVINAVIRKYGQFDQINIELATELKNSKFDRSKIEEGQKKFQSQKDKIFKEVQELRGGMTPSSSLLLKYRLWREQDERCVYSGRKISFEDLLDTGFLDIDHIIPYSKSMDDSFNNKVLCLAEENRNKKNDIPFNYYQRIDRDWNLLISIITSMKNMKIAKKSRLLKQELSDIEGFIERNINDTRYATRYIKDFLENNLEFKENEFIKVKVQARSGGLTSVLSYNWGMSKDREESYFHHAKDAIIVACSTQGMVQYISKISQQYENDKDKMKKIKDKTENCIPKPWDSFRADVEESIEGIFVSFAPRHKVTGSAHKETIYSKKHLEKERYVTVKKSLDKIKLSDLENIPCNENCGIIRVLKERLEKFKNDSLKAFADPVHMPTKCPNKKGPVIRSVKIKESNKTGIEVRKGLAERGEMVRVDVFIKDKKYYLVPIYVSDFKNKDLPNKAIAALKLENEWIMIDKTYSFKFSLFKDDLIKIKKKKEEIFGYFGGVHRSTGTIKIKSRHKPKEIDEGIGSRCLLDFRKFQVDVLGNYTEVKHEKRMPAYITRKDKKH

SEQ ID NO: 70 - protein, 1361 aa, Lactobacillus casei
MTKLGKPYGIGVDIGSNSIGFAAVDENSHLIRLKGKTVIGARLFEEGKAAADRRASRTTRRRLSRNRWRLSFLRDFFESHITPTGPNFFMRQKYSEISPKDKARYKYEKRLFNDRTDAEFYQQYPTMYHLRNRLLTDPSKADVREIYFAIHHILKSRGHFLTSGYAKDFNTNKVALNEIFPALQDAYAQVYPDLDITFDENKVNEFKTVLLNEKATPSDTQRALVNLLLAEDGDKDILKQQKQVLTEFAKAVVGLKTKLNVALGTEVDSSEATVWNFSLGQLDDKWAGIESAMTDEGTEILDQIRDLYRARLLNGIVPAGKTLSQAKVDDYAQHHEDLELFKDYLKQLEDDGTAKAIRQLYDRYIDGDDAKPFVREDFVKALTKEVTAHPNAKSPELLERLAQPDFMLKQRNKANGAIPVQMQQRELDQIIKNQSVYYDWLAAPNPVEKHRKSMPYQLDELLNFRIPYYVGPLVTAKEQKAAQGGVFAWMVRKDPDGNITPYNFDEKVDREASANTFIQRMKTTDTYLIGEDVLPKQSLLYQRYEVLNELNNVRVNNEKLSIEQKQQVIRELFERHNSVTIKQFAENLRAHGDYAHIPEIRGLADEKRFLSSLSTYRQLKSLLPDAIDDPAKQADIENIIAWSTVFEDAAIFKTKLKEINWLDSQTITKLSNIRYRGWGQFSHKFLNGLTLGNGHTIIQELFLSNNNLMQILTDETLQKKMTELNADKLKAANINDAIDDAYTSPSNKKALRQVLRVIEDIKRAADGQDPSWLYVETADGGGTPGKRTRARQHQLQEIYANAAHELIDSAVRGELEDKIADKADFNDRLVLYFMQGGRDIYTGTPLNIDQLSSYDIDHILPQSLIKDNSLDNRVLVHAIINREKNATFASTIYAQKMNATWRQWHEAGLISGRKLRNLQMRPDQIDKYASGFVARQLVETRQIIKLTEQIVAAQYPETKIIAVKAGLSHQLREELEFPKNRDVNHYHHAFDAFLAARIGTYLLKRFPNLQAFFTYGKFKKADVKKLRGFNFIRDITHAEDKIVVKDTGEVIWDKKRDVDELDRIYNFKRMLITHEVHFEKADLFKQTVYGAKDSKEAGGKKQLISKKKGYPVDIYGGYTQETGSYLSVVRLTKKAMYAVVKVSTRDAAKLAVAKSISEQKENETLNDIIDEKLSKISKNGKITHELFEVVLPRVGQKTLFKNSKYNLFLVNSDTYMHNYQELWMPREYQKMWKDISLSKYGDAQTEDQLDQIFGFIVSQVNSYFNLYDINQFRKKLNDAADKFATLPMRDTDDMQGKIATIGQLLIGLQANAARSDLRNLDIKTPLGLLQIPNGISLDSDTSVVYQSPTGLLEREVHLSDL

SEQ ID NO: 71 - protein, 1348 aa, Streptococcus equi
MKKPYTIALDIGTNSVGWVVVTDDYRVPTKKMKVLGNTERKTIKKNLIGALLFDSGDTAEGTRLKRTARRRYTRRKNRLRYLKEIFTEEMAKVDDGFFQRLEDSFYVLEDKEGNKHPIFANLADEVAYHKKYPTIYHLRKELVDNPQKADLRLIYLAVAHIIKFRGHFLIEGTLSSKNNNLQKSFDHLVDTYNLLFEEQRLLTEGINAKELLSAALSKSKRLENLISLIPGQKKTGIFGNIIALSLGLTPNFKANFGLSKDVKLQLAKDTYADDLDSLLAQIGDQYADLFLAAKNLSDAILLSDILTESDEITRAPLSASMVKRYREHHKDLVTLKTLIKDQLPEKYQEIFLDKTKNGYAGYIEGQVSQEEFYKYLKPILARLDGSEPLLLKIDREDFLRKQRTFDNGSIPHQIHLEELHAILRRQEVFYPFLKDNRKKIESLLTFRIPYYVGPLARGHSRFAWVKRKFDGAIRPWNFEEIVDEEASAQIFIEKMTKNDLYLPNEKVLPKHSLLYETFTVYNELTKVKYATEGMTRPQFLSADQKQAIVDLLFKTNRKVTVKQLKENYFKKIECWDSVEITGVEDSFNASLGTYHDLLKIIQDKDFLDNPDNQKIIEDIILTLTLFEDKKMISKRLDQYAHLFDKVVLNKLERHHYTGWGRLSGKLINGIRDKQSGKTILDFLKADGFANRNFMQLIHDSELSFIDEIAKAQVIGKTEYSKDLVGNLAGSPAIKKGISQTIKIVDELVKIMGYLPQQIVIEMARENQTTAQGIKNARQRMRKLEETAKKLGSNILKEHPVDNSQLQNDKRYLYYLQNGKDMYTGDDLDIDYLSSYDIDHIIPQSFIKNNSIDNKVLTSQGANRGKLDNVPSEAIVRKMKGYWQSLLRAGAISKQKFDNLTKAERGGLTQVDKAGFIQRQLVETRQITKHVAQILDSRFNTEFDDHNKRIRKVHIITLKSKLVSDFRKEFGLYKIRDINHYHHAHDAYLNAVVAKAILGKYPQLAPEFVYGDYPKYNSFKERQKATQKMLFYSNILKFFKDQESLHVNSDGEEIWNANKHLPIIKNVLSIPQVNIVKKTEVQTGGFYKESILSKGNSDKLIPRKNNWDTRKYGGFDSPTVAYSVLVIAKMEKGKAKVLKPVKEMVGITIMERTAFEENPVVFLEARGYREIQEHLIIKLPKYSLFELENGRRRLLASASELQKGNELFLPVDYMTFLYLAAHYHELTGSSEDVLRKKYFVDRHLHYFDDIIQMINDFAERHILASSNLEKINHTYHNNSDLPVNERAENIINVFTFVALGAPAAFKFFDATIDRKRYTSTKEVLNATLIHQSVTGLYETRIDLSQLGEN

SEQ ID NO: 72 - protein, 1341 aa, Ruminococcus lactaris
MGKGYYVGLDMGTGSVGWAVTDESYQILRRHGKAMWGVRLFESAKTAEERRMFRTGRRRLDRRGWRIEILQEIFAEEISRVDPGFFLRMKESKYYPEDKRDIQGNCPELPYTLFVDKTFTDKDFHKKYPTIYHLRKMLMETEDTPDMRLVYLALHHMMKHRGHFLLSGDISQVTEFKNTFNQFIENIRNEEMDFEIELDESAVQMIEETLKDKNLTRSAKKSKLVKGLNAKNVRDKAFLTLLSGGTVKLSDLFGMEELNEGERPKISFADNGYEEYAAVVEMELGELYYIVESAKAVYDWAILSDILGGSTSVSDAKVRAYEKHKADLKYLKAVVKEYFPKEVYNAVFVESSDKLNNYPAYIGMTKKNGKKVSLEGKRCSREEFMDFLKKNIVVKLPDEEAKMYLQSELEKDSFLPKQVNKDNGVIPYQVHKYELKKILDNLGDKIPFLKENAEKIEKLFSFRIPYYVGPLRTGNGENSKFAWAERKSTEKIYPWNFENVIDVEQSAENFIRRMTNKCTYLIGEDVLPKDSLLYSKFMVLNELNNLRLDGQKISVELKQKIYRDVFCRSRKVTQKKLKSYLIREGIAGKNVELTGIDGDFKGSLTAYHDFKEKLIDVELTQKEKEEIILNIVLFGDDKKLLKQRLKKKFPQLTEKQINTVTALSYKGWGRLSKKLLEEVTVPAPETGEVWNIITALWETNDNFMQLLSKEYQFSDRIEEFNEEKADPEVSYQTIEDLYVSPAVKRQIWQTLQIIQEIEKVMGEKPKRVFVEMAREKQENKRTESRKKTLSDLYTKCKKEEPEWIEALCTSLEKHEEHQLRSDKLYLYYTQKGRCMYSGEPIDLEDLWDNTKYDIDHIYPQSKTMDDSLKNRVLVKKEYNAKKSDTYPIAADIQKKMMPFWKSLLTGGFIPKEKYDRLVRNNPLDANELAGFIERQIVETRQSTKAVAEILKKILPDTEIVYVKAKTVSKFRQDFDFIKVRDMNDLHHAKDAYLNIVVGNVYFVKFTKNAAWFVKENPGRTYNLEKMFIWDVARDGEIAWKAGKSGSIVQVRAMMEKNHILVTRRSYEVKGGLFDQQILKKGKGQVPVKESDERLRDIGKYGGYNKAAGVYFMLVSSKDKKGKEQRTIEFVPIYLKDRVEKDMESARNYLMEERGLREPKILIKKIKIDTLFKVDGFYMWLSGRTSNQLIFKGANQLILSKEDMKTLKKVVKYIQRQKEDKNVKISMRDGITEEELLKLYETFLDKIRHSIYGARLSSQEKTLVNGKEKFIDLSVEAKCQVLYEILHLFQCQSGAANLKMIGGPASAGILVMNNNISKCKNISIVNQSPTGIYEKEIDLLRV

SEQ ID NO: 73 - protein, 1003 aa, Gluconacetobacter diazotrophicus
MIDESLTFGIDLGIGSCGWAVLRRPSAFGRKGVIEGMGSWCFDVPETSKERTPTNQIRRSNRLLRRVIRRRRNRMAAIRRLLHAAGLLPSTDSDALKRPGHDPWELRARGLDKPLKPVEFAVVLGHIAKRRGFKSAAKRKATNISSDDKKMLTALEATRERLGRYRTVGEMFARDPDFASRRRNREGKYDRTTARDDLEHEVHALFAAQRRLGQGFASPELEEAFTASAFHQRPMQDSERLVGFCPFERTEKRAAKLTPSFERFRLLARLLNLRITTPDGERPLTVDEIALVTRDLGKTAKLSIKRVRTLIGLEDNQRFTTIRPEDEDRDIVARTGGAMTGTATLRKALGEALWTDMQERPEQLDAIVQVLSFFEANETITEKLREIGLTLAVLDVLLTALDAGVFAKFKGAAHISTKAARNLLPHLEQGRRYDEACTMAGYDHAASRLSHHGQIVAKTQFNALVTEIGESIANPIARKALIEGLKQIWAMRNHWGLPGSIHVELARDVGNSIEKRREIEKHIEKNTALRARERREVHDLLDLEDVNGDTLLRYRLWKEQGGKCLYTGKAIHIRQIAATDNSVQVDHILPWSRFGDDSFNNKTLCLASANQQKKRSTPYEWLSGQTGDAWNAFVQRIETNKELRGFKKRNYLLKNAKEAEEKFRSRNLNDTRYAARLFAEAVKLLYAFGERQEKGGNRRVFTRPGALTAALRQAWGVESLKKQDGKRINDDRHHALDALTVAAVDEAEIQRLTKSFHEWEQQGLGRPLRRVEPPWESFRADVEATYPEVFVARPERRRARGEGHAATIRQVKERECTPIVFERKAVSSLKEADLERIKDGERNEAIVEAIRSWIATGRPADAPPRSPRGDIITKIRLATTIKAAVPVRGGTAGRGEMVRADVFSKPNRRGKDEWYLVPVYPHQIMNRKAWPKPPMRSIVANKDEDEWTEVGPEHQFRFSLYPRSNIEIIRPSGEVIEGYFVGLHRNTGALIPTPVGPDSYVIA

SEQ ID NO: 74 - protein, 1368 aa, Streptococcus pyogenes
MDKKYSIGLDIGTNSVGWAVITDDYKVPSKKFKVLGNTDRHSIKKNLIGALLFDSGETAEATRLKRTARRRYTRRKNRICYLQEIFSNEIAKVDDSFFHRLEESFLVEEDKKHERHPIFGNIVDEVAYHEKYPTIYHLRKKLADSTDKADLRLIYLALAHMIKFRGHFLIEGDLNPDNSDVDKLFIQLVQTYNQLFEENPINASRVDAKAILSARLSKSRRLENLIAQLPGEKRNGLFGNLIALSLGLTPNFKSNFDLAEDAKLQLSKDTYDDDLDNLLAQIGDQYADLFLAAKNLSDAILLSDILRVNTEITKAPLSASMIKRYDEHHQDLTLLKALVRQQLPEKYKEIFFDQSKNGYAGYIDGGASQEEFYKFIKPILEKMDGTEELLAKLNREDLLRKQRTFDNGSIPHQIHLGELHAILRRQEDFYPFLKDNREKIEKILTFRIPYYVGPLARGNSRFAWMTRKSEETITPWNFEEVVDKGASAQSFIERMTNFDKNLPNEKVLPKHSLLYEYFTVYNELTKVKYVTEGMRKPAFLSGEQKKAIVDLLFKTNRKVTVKQLKEDYFKKIECFDSVEISGVEDRFNASLGTYHDLLKIIKDKDFLDNEENEDILEDIVLTLTLFEDREMIEERLKTYAHLFDDKVMKQLKRRRYTGWGRLSRKLINGIRDKQSGKTILDFLKSDGFANRNFMQLIHDDSLTFKEDLQKAQVSGQGDSLHEHIANLAGSPAIKKGILQTVKVVDELVKVMGRHKPENIVIEMARENQTTQKGQKNSRERMKRIEEGIKELGSDILKEYPVETTQLQNEKLYLYYLQNGRDMYVDQELDINRLSDYDVDHIVPQSFLKDDSIDNKVLTRSDKNRGKSDNVPSEEVVKKMKNYWKQLLNAKLITQRKFDNLTKAERGGLSELDKAGFIKRQLVETRQITKHVAQILDSRMNTKYDENDKLIREVRVITLKSKLVSDFRKDFQFYKVREINNYHHAHDAYLNAVVGTALIKKYPKLESEFVYGDYKVYDIRKMIAKSEQEIGKATAKYFFYSNIMNFFKTEITLANGEIRKRPLIETNGETGEIVWDKGRDFATVRKVLSMPQVNIVKKTEVQTGGFSKESILPKRNSDKLIARKKDWDPKKYGGFDSPTVAYSVLVVAKVEKGKSKKLKSVKELVGITIMERSSFEKDPVDFLEAKGYKEVRKDLIIKLPKYSLFELENGRKRMLASAGELQKGNELALPSKYVNFLYLASHYEKLKGSPEDNEQKQLFVEQHKHYLDEIIEQISEFSKRVILADANLDKVLSAYNKHRDKPIREQAENIIHLFTLTNLGAPAAFKCFDTTIGRNRYKSIKEVLDATLIHQSITGLYETRIDLSQLGGD

SEQ ID NO: 75 - protein, 1504 aa, Bacteroides dorei
MKNIVGLDLGTNSIGWAVVNGSVNDDGSEQLVKIQASGSRIIPMDAAMIGDFNKGNSISQTAERTRLRGVRRLSERYLLRRERLHRILDILGFLPFHFAQDLDRHGKIVKGKEPKLAWRKNEAGQFEFIFQDSFKEMLEDFKLNYPNLITDDKKVPYDWTIYYLRKKGLTSKISKEELAWILLNFNQKRGYYQLRGEEEEENKDKLVEFYALKVVAVEDSGEKKGKDIWYNVHLENGWVYRRTSNMSLDWVGKTKEFIVTTDLEKDGTPKKDKEGNVKRSFRAPKEDDWSLVKKKTEADIDQTHKTVGAYIYDTLLGNPSQKIRGRLVRTIERKYYKEELKLILEKQKEFHLELQDRALYAACIEELYPINEAHRNNVGNRDFTYLFLEDILFYQRPLKSKKSLIDNCPYEENQGLDKETGEIKSFPVKCIAKSHPLFQEFRLWQFIINLRIYRKDLAQDVDVTNELLKTEEDYVALFDWLNGKKEIDQKAFLKYPVFGLKKEIENYRWNYVQDKPYPCNETRSLMLARLEKCDISIEFLTKENEEALWHILYSVEDKNEIVKALQKFADKHDLNASFVDVFQKFPPFKKEYGSYSAKAIKKLLPLMRMGKYWSENSIDKGTRERIDKIITGEYDEKIENRVREKAIHLADVSDFKGLPLWLVCYIVYGRHSEAKEIIQWKSPADIDSYLRSFKQHSLRNPIVEQIIIETLRVVRDIWKQVGNIDEIHVELGREMKNPADKRKKMTQQMSENENTNLRIKYLLTEFLNPEYEVENVRPYSPSQQDILRIYEEGVLNSVSDLPEEISDILKKFTETDLKKRPSRSEVLRYKLWLEQKYRSPYTGEVIPLGKLFTPAYEIEHVIPQSYYFDDSFSNKVICEAEVNKLKSNLLGHEFIVKHHGEIVELPFGKKVRIFTVDEYEQFVKDNYSRTRSKMKKLLMDDIPEEFVTRQLNDSRYISKVVKSLLSNIVREKGEEEAISKNVIPCTGGVTDRLKKDWGINEVWNKIILPRFQRLNELTGTNKFTTKNVGIQEIPTMPLELQKGFNKKRIDHRHHAMDAIIIACANRNIINYLNNKSATAKAELSRYDLQKMLCDKAKTDNNGNYKWVIRKPWASFTQDTYLALENIIVSFKQNLRVINKATNRFLHYNEEGKKIFVKQGKGDNWAIRKSMHKDTVFGEVNLRRIKTVALNEAMKNPQSIVVKDFKRKLLELWNLGFDAKRIKKYFEDNRETWSDINLSKIEVYYFSKDTKDRFFATRKPLDTSFDRKKIENNITDTGIQKILLRHLELKDNNPDIAFSPDGIDEMNRNIIQLNNGKYHQPIIKIRWYEQADKFAVGQTGNKSSKFVEAAKGTNLFFAVYESNILDKKTNTIIKKRNYATIPLNVAIERQKQGLPVAPEDENGNDPIFVLSPNDLVYLPTDDELANGIIAQPLDRGRIYKMVSSSGEQCFFIKHIVANVLVDKFEFSPLNKMERALTGEMIKMICIPIKVDRLGNVLESSSSYKK

SEQ ID NO: 76 - protein, 1426 aa, Capnocytophaga sputigena
MKNILGLDLGITSISFAHIVEDENKEKSEIKELGVRIVSLTTDEQSDFEKGKSITTNANRTLKHGARLNLDRYQQRRKYLIDLLQKANLITSSSILAENGKNTTHSTWQLRAKAVTERIEKEEFARVLLAINKKRGYKSSRKAKTEDEGQAIDGMAIAKRLYDENLTPGQLSLQLLQQNKKLLPDFYRSDLQREFDLVWNFQKQFYPDILTDSFYKELQGKGKDATSKAFSKRYHFDTAENKGSKESVRLQAYQWRAEAISKQLSKEEVAYVLTEINNNLNNASGYLGAISDRSKELYFNRQTVGQYLYAQLQENRHNSLKNKVFYRQDYLDEFERIWETQASFHKELTDELKKQIRDVVIFYQRKLKSQKGLISFCEFESKEIEIEKDGKTITKTIGARVVPKSSPLFQEFKIWQILNNVTCKRKGIRKKKSSAKSTELDLFNEPSQTIFSLDMECKQLLFDELNLKGDLKSDKVLKLLGYSPQEWEINYNQLEGNRTQKALYEAYLKIVEMEAHDVKDILQIKSAKDDWSLDESPLSASEIKEKVKDIFQALGICTKILYFDPLLPVKEFEKQDSYQLWHLLYSYESDDSTSGNETLYRILEKKYAFKREHARILANVALQDDYGSLSTKAIRKIYPNIKENQYSKACELAGYKHSKLSLTTEELEARELKNIIPLLKKNALRNPVVEKILNQMINVVNALIEKNSERDAEGKITKYFHFDEIRIELARELKKNAQKRYEMTQNINKAKLEHQKISEILQKKFGIKNPTKSDIIRYRLYQELEHNGYKELYTNAPIARDMLFSKNIEIEHIVPKARVFDDSFSNKTLTFHRINSNKGEYTAFDYITSLNSEEELNQYLTRVENAYKTKSISLTKYKNLLKKASEIGDGFINRDLRDTQYIAKKAKEILFQVTKNVLSTSGSITDRLREDWGLVDVMKELNMPKYQSLGLTEVEERKEGNKVTVIKNWTKRNDHRHHAMDALTVAFTKPSYIQYLNHLNARKDENNKNYSVILAIEEKETIKVPTNNGKNKRVFIEPIPNFRQVAKKHLEEIFISHKAKNKVVTKNVNKPAGTDKQQITLTPRGQLHKETIYGKYQYYVNKEEKVGVKFDERTITKVSNPLYREALLKRLQANDNDPKKAFTGKNALSKNPIYLDETKTKTLPEKVNLTYLEEDFSIRKDISPDNFKDLKSIEKVIDQGVKRILIKRLQDYDNDPKKAFVDLEKNPIWLNKEKGIAIKRVTISGVSNAQPLHIGKDHLGKTTLNKEGNEIPVDYVSTGNNHHVAIYRDKEGNLQEQIVSFFEAVVRTQQGLPIIDKTYKQEEGWQFLFTMKQNEMFVFPNATTGFNPAEIDLLDPKNKKLISPNLFRVQKIATKDYFFRHHLETNVETDNVLKNTTWKREGLSGLKDIVKVRINHLGDIVSIGEY

SEQ ID NO: 77 - protein, 1443 aa, ParaBacteroides johnsonii
MIKLLYLEKLKQYTMKKILGLDLGTSSIGWALVNEAENSDEVSSIIKLGVRVNPLTVDEMQNFEKGKSITTNADRTLKRSMRRNLQRYKLRRDALIELLKKVGFITDKTILSEQGNRTTFETYRLRAKAAEEEISLKELARVLLMINKKRGYKSSRKAKGEEEGALIDGMEIAKKLYDEDLTPGQLCLQLLESGKKFFPDFYRSDLQEEFNKIWDFQKQFNLFSFCDVAKEEVKGKNKSQTWAILAKYFVETKKVNVWNEHEAQTENREEVYKLVGLKRTVKGEELKKENYRWRVQALTEQLDLEKIAVVLQEINGQISASSGYLGAISDRSKVLYFNRQTVGQYQMAELNKNPNMSLRNMVFYRQDYLDEFNVIWEKQAEFHKELTPELKKEIRDIIIFYQRRLKSQKGLISFCEFENREVVVEKEGKKQTKIIGCKVIPRSHPLFQEFKIWQTLNNIEVFVGEKKGKRKKSNVSSDLFGDTEDALITEGRRFLYQEEKKILAKELSIKKGLTKAEILRLLFENPQELDINFKQIDGNQTGFALFSAYSNMIEKYGYEPLDFKKPAEDLISQLKTVFTDLGWNTDLLFIDLDKENKEWEKQPYFRLWHLLYSFEGDNTPTGNGKLIEKIMQLCGIEKEYAIELANVSLQDDYGSLSAKAIKKILLYLKEGNQYDMACEYAGYRHSKSSLTKEEIENKVLKDKLEILPKNSLRNPVVEKILNQMVNVINTVMEVYGRPDEIRVELARELKKSAKEREELTKAVAKNTREHEEIRKVLQSEFGMINVSRNDIIRYKLYEELKDNGYKTLYSNQYIPREKLFSKEIDIEHIIPQSRLFDDSLSNKTLEYKSINIEKGNKTAYDFVKEKYGEEGLQQYLNRCENLCKDKKAKLRKLKMELNEIPDGFIDRDLRNTQYIAKKALSMLTEICRRVVATTGSITDKLREDWQLVDVMKELNLPKYEALGLVEVYEDKDGRKIKRIKDWTKRNDHRHHAMDALTVAFTKDVFIQYFNNKNAAWESDSKEHTNIVGIKTRYFESGKAVPPIPLGQFRVEAKCHLENLLVSIKAKNKVVTTNVNCIKKKGGTYKNTQQTPRGQLHLETIYGSHNQYVTKIEKVNASFDAVKIATVSKQDYRNALLKRLEVFGNDPKKAFTGKNSLEKNPIYLDRAQTIQVPDKVQTVELETAYTIRKPVDPTLNVDKVVDKKIRLILEQRLKEYGGDAKKAFVNLDENPIWLNEEKGISIKRVTIRGISKAQALHDKKDKDGNFILDETGKRIPVDFVNTGNNHHVAIYRKPVLDKKGQVIFDDEGNPMYELDEDVVPFFEAVTRANLGIPIIDKDYKKSEGWQFLFSMKQNEYFVFPNEKTGFNPKEVDLLDPDNYAMISPNLFRVQKIGLNDYTFRHHLETTIQNDLKFITWIRCGKSGIKDIVKVRINHIGQIVSVGEY

SEQ ID NO: 78 - protein, 984 aa, Campylobacter jejuni
MARILAFDIGISSIGWAFSENDELKDCGVRIFTKVENPKTGESLALPRRLARSARKRLARRKARLNHLKHLIANEFKLNYEDYQSFDESLAKAYKGSLISPYELRFRALNELLSKQDFARVILHIAKRRGYDDIKNSDDKEKGAILKAIKQNEEKLANYQSVGEYLYKEYFQKFKENSKEFTNVRNKKESYERCIAQSFLKDELKLIFKKQREFGFSFSKKFEEEVLSVAFYKRALKDFSHLVGNCSFFTDEKRAPKNSPLAFMFVALTRIINLLNNLKNTEGILYTKDDLNALLNEVLKNGTLTYKQTKKLLGLSDDYEFKGEKGTYFIEFKKYKEFIKALGEHNLSQDDLNEIAKDITLIKDEIKLKKALAKYDLNQNQIDSLSKLEFKDHLNISFKALKLVTPLMLEGKKYDEACNELNLKVAINEDKKDFLPAFNETYYKDEVTNPVVLRAIKEYRKVLNALLKKYGKVHKINIELAREVGKNHSQRAKIEKEQNENYKAKKDAELECEKLGLKINSKNILKLRLFKEQKEFCAYSGEKIKISDLQDEKMLEIDHIYPYSRSFDDSYMNKVLVFTKQNQEKLNQTPFEAFGNDSAKWQKIEVLAKNLPTKKQKRILDKNYKDKEQKNFKDRNLNDTRYIARLVLNYTKDYLDFLPLSDDENTKLNDTQKGSKVHVEAKSGMLTSALRHTWGFSAKDRNNHLHHAIDAVIIAYANNSIVKAFSDFKKEQESNSAELYAKKISELDYKNKRKFFEPFSGFRQKVLDKIDEIFVSKPERKKPSGALHEETFRKEEEFYQSYGGKEGVLKALELGKIRKVNGKIVKNGDMFRVDIFKHKKTNKFYAVPIYTMDFALKVLPNKAVARSKKGEIKDWILMDENYEFCFSLYKDSLILIQTKDMQEPEFVYYNAFTSSTVSLIVSKHDNKFETLSKNQKILFKNANEKEVIAKSIGIQNLKVFEKYIVSALGEVTKAEFRQREDFKK

SEQ ID NO: 79 - protein, 1082 aa, Neisseria meningitidis
MAAFKPNPINYILGLDIGIASVGWAMVEIDEDENPICLIDLGVRVFERAEVPKTGDSLAMARRLARSVRRLTRRRAHRLLRARRLLKREGVLQAADFDENGLIKSLPNTPWQLRAAALDRKLTPLEWSAVLLHLIKHRGYLSQRKNEGETADKELGALLKGVADNAHALQTGDFRTPAELALNKFEKESGHIRNQRGDYSHTFSRKDLQAELILLFEKQKEFGNPHVSGGLKEGIETLLMTQRPALSGDAVQKMLGHCTFEPAEPKAAKNTYTAERFIWLTKLNNLRILEQGSERPLTDTERATLMDEPYRKSKLTYAQARKLLGLEDTAFFKGLRYGKDNAEASTLMEMKAYHAISRALEKEGLKDKKSPLNLSPELQDEIGTAFSLFKTDEDITGRLKDRIQPEILEALLKHISFDKFVQISLKALRRIVPLMEQGKRYDEACAEIYGDHYGKKNTEEKIYLPPIPADEIRNPVVLRALSQARKVINGVVRRYGSPARIHIETAREVGKSFKDRKEIEKRQEENRKDREKAAAKFREYFPNFVGEPKSKDILKLRLYEQQHGKCLYSGKEINLGRLNEKGYVEIDHALPFSRTWDDSFNNKVLVLGSENQNKGNQTPYEYFNGKDNSREWQEFKARVETSRFPRSKKQRILLQKFDEDGFKERNLNDTRYVNRFLCQFVADRMRLTGKGKKRVFASNGQITNLLRGFWGLRKVRAENDRHHALDAVVVACSTVAMQQKITRFVRYKEMNAFDGKTIDKETGEVLHQKTHFPQPWEFFAQEVMIRVFGKPDGKPEFEEADTPEKLRTLLAEKLSSRPEAVHEYVTPLFVSRAPNRKMSGQGHMETVKSAKRLDEGVSVLRVPLTQLKLKDLEKMVNREREPKLYEALKARLEAHKDDPAKAFAEPFYKYDKAGNRTQQVKAVRVEQVQKTGVWVRNHNGIADNATMVRVDVFEKGDKYYLVPIYSWQVAKGILPDRAVVQGKDEEDWQLIDDSFNFKFSLHPNDLVEVITKKARMFGYFASCHRGTGNINIRIHDLDHKIGKNGILEGIGVKTALSFQKYQIDELGKEIRPCRLKKRPPVR

SEQ ID NO: 80 - protein, 1021 aa, Clostridium cellulolyticum
MKYTLGLDVGIASVGWAVIDKDNNKIIDLGVRCFDKAEESKTGESLATARRIARGMRRRISRRSQRLRLVKKLFVQYEIIKDSSEFNRIFDTSRDGWKDPWELRYNALSRILKPYELVQVLTHITKRRGFKSNRKEDLSTTKEGVVITSIKNNSEMLRTKNYRTIGEMIFMETPENSNKRNKVDEYIHTIAREDLLNEIKYIFSIQRKLGSPFVTEKLEHDFLNIWEFQRPFASGDSILSKVGKCTLLKEELRAPTSCYTSEYFGLLQSINNLVLVEDNNTLTLNNDQRAKIIEYAHFKNEIKYSEIRKLLDIEPEILFKAHNLTHKNPSGNNESKKFYEMKSYHKLKSTLPTDIWGKLHSNKESLDNLFYCLTVYKNDNEIKDYLQANNLDYLIEYIAKLPTFNKFKHLSLVAMKRIIPFMEKGYKYSDACNMAELDFTGSSKLEKCNKLTVEPIIENVTNPVVIRALTQARKVINAIIQKYGLPYMVNIELAREAGMTRQDRDNLKKEHENNRKAREKISDLIRQNGRVASGLDILKWRLWEDQGGRCAYSGKPIPVCDLLNDSLTQIDHIYPYSRSMDDSYMNKVLVLTDENQNKRSYTPYEVWGSTEKWEDFEARIYSMHLPQSKEKRLLNRNFITKDLDSFISRNLNDTRYISRFLKNYIESYLQFSNDSPKSCVVCVNGQCTAQLRSRWGLNKNREESDLHHALDAAVIACADRKIIKEITNYYNERENHNYKVKYPLPWHSFRQDLMETLAGVFISRAPRRKITGPAHDETIRSPKHFNKGLTSVKIPLTTVTLEKLETMVKNTKGGISDKAVYNVLKNRLIEHNNKPLKAFAEKIYKPLKNGTNGAIIRSIRVETPSYTGVFRNEGKGISDNSLMVRVDVFKKKDKYYLVPIYVAHMIKKELPSKAIVPLKPESQWELIDSTHEFLFSLYQNDYLVIKTKKGITEGYYRSCHRGTGSLSLMPHFANNKNVKIDIGVRTAISIEKYNVDILGNKSIVKGEPRRGMEKYNSFKSN

SEQ ID NO: 81 - protein, 1131 aa, Acidovorax ebreus
MAQHVFGLDIGIASVGWAILGEQRIIDLGVRCFDKAETAKEGDPLNLTRRQARLLRRRLYRRAWRLTQLSRLLKRKGLIADAKLFAKAPSYGDSAWELRRQGLDRLLTPLEWARVIYHQCKHRGFHWTSKAEEAKADSDAEGGRVKQGLAHTKALMQAKNYRSAAEMVLAEFPDAQRNKRGQYDKALSRVLLGEELALLFATQRRLGNPHASDFFEKLILGDGDRKSGLFWQQKPALSGADLLKMLGKCTFEKGEYRAPKASFSVERHVWLTRLNNLRIVVDGRSRPLNEAERQAALLLPYQTETSKYKTLKNAFIKAGLWGDGVRFGGLAYPSQAQIDAEKTKDPEDQFLVKLPAWHELRKAFKAAGHEALWQQISTPALDGDPTLLDQIATVLSVYKDGAEVVQQLRQLALPEPAASIAVLEKISFDKFSSLSLKALRRIVPLMQSGLRYDEAVAQIPEYGHHSQRIEPGAAKHLYLPPFYEAQRKYAGKGDHIGSMQFRDDADIPRNPVVLRALNQARKVVNALIREYGSPIAVNIEMARDLSRPLDERNKVKRAQEEFRDRNDRARSEFERDFGYKPKAAAFEKWMLYREQLGQCAYSQQPLDIQRVLDDHNYAQVDHALPYSRSYDDSKNNKVLVLTHENQNKGNRTAFEYLTSFPDGEDGERWRTFVAWVQGNKAYRMAKRNRLLRKNYGVDESKGFIDRNLNDTRYICKFFKNYVEEHLQLAARADGDTARRCVVVNGQLTAFLRARWGLTKVRGDSDRHHALDAAVVAACTHGMVKALADYSRRKEISFLQEGFPDPETGEILNPAAFDRARQHFPEPWTHFAHELKARLFTDDLAALREDMQRLGSYTTEDLGRLRTLFVSRAPQRRSGGAVHKETIYAQPESLKQQGGVIEKILLTSLKLQDFDKLLNPESNDHFVEPHRNERLYAAIRQRLEQFGGRADKAFGPDNLFHKPDKNNQPTGPVVRSIKLVRGKQTGIPIRGGLAKNDSMLRVDIFTKAGKFHLVPVYVHHRVTGLPNRAIVAFKDEDEWTLIDESFAFLFSVYPNDYVKVTLKKEQQSGYYSGADRSTGAMNLWAHDRAASVGKDGLIRGIGVKTALSVEKFNVDVLGRIYLAPPETRSGLA

SEQ ID NO: 82 - protein, 1122 aa, Streptococcus suis
MSNGKILGLDIGIASVGVGVIDAQTGEIIHASSRIFPSANAANNAERRTFRGSRRLIRRKKHRIKRLDDLFNDFHINLDGEMSTDNPYVLRVKGLSQKLTVEELYISIKNIMKRRGISYLDDAESDNEAGRSDYAKAIERNRQLLTSKTPGEIQLERLEKYGQLRGNFTIIDEEGQSQQIINVFSTSDYVKEVEKILDCQKMYHKFISDEFCDKLIELLREKRKYYVGPGNEKSRTDYGIYRTDGTTLENLFGILIGKCTFYPDQYRSSRASYTAQEFNFLNDLNNLTVPTETKKLSQEQKEFLVNYAKETSVLGAGKILQQIAKLADCKVEDIRGYRLDNKDKPELHTFETYRAMKGLVPLVDIGVLSREQLDILADILTLNTDFEGIREALKKQLPNVFDEKQVKGLASFRKSKSQLFAKGWHNLSQKIMLEVIPELYATSDEQMTILTRLGKFEKSSVAEYPSSINVDEITDEIYNPVVAKSIRQTIKIINASIKKWGEFDQIVIEMPRDRNEDEEKKRIADGQKANAKEKADSILRAAELYCAGKVLPDYVYNGHNQLATKIRLWYQQGERCIYTGQPISIHDLIHNQNQYEIDHILPLSLTFDDSLSNKVLVLATANQEKAQRTPYNYLKSATSAWSYREFKDYVTKRKGIGKKKCEYLTFEEDINGFEVRSKFIQRNLVDTRYASKVILNALQDYFKISGIQTKVSVVRGQFTSQLRHKWGIEKTRETYHHHAVDALIIAASSQLRLWKKQESPLVVDYQEGRQVDLETGEILELTDEQYKELVYQPPYQGFVNTISSSAFDNEILFSYQVDSKVNRKISDATIYATRNAQLGKDKTEGIYVLGKIKDIYTQAGYEAFLKRYTKDKTSFLMYHKDLDTWEKVIEIILRDYREYDEKGKEIGNPFERYRRENGYVKKYSRKGNGTAIKSLKYYDNKLGNHIDITPENSRNAVVLQSLKPWRTDVYFNKETGKYEFLGIKYSDLSFEKGTGEYGISQEKYDSIKIAEGVAKKSIFKFTLYKQDLLFIKDIENNFGKLLRFTSKNDTSKHYVELKPYDKNKFGTEEPLLPVLGNVAKSGQCIKGLNKSNISIYKVRTDILGYRHFIKQEGEHPQLKFKK

SEQ ID NO: 83 - protein, 1509 aa, Bacteroides coprophilus
MKKTLGLDLGTNSIGWAVINSNIDSEGKEKLVGISSCGSRIIPMDATTLGDFGKGNTKSPVAERTRLRGIRRLLERSLLRRERLHRVLSVMGFLPEHYASQLDRYGKFLPETEPKLAWYKDDSGRYQFLFQKSFHEMLEDFRQHQPELVAGEKKIPYDWTIYYLRKKALSQEITKEELAWILLNFNQKRGYYQLRGEEEQEENNKSVEYHALKVVSVEDSGERKGKDIWYNVTLENGWVYRRASNIPLDWTGKVKEFVVTTELDDAGNPKKDKEGNVKRSFRAPKEDDWGLLKTRTQAQIDESGKTVGTYIYESLLCMPNQKIRGKLVRTIERKYYKDELRQILVKQSEFHAALQDHNLLLSCIEELYPNNEAHRRLLSASSFIYFLIEDILFYQRPLKSQKGLIDNCPYESHIYKDKKDGSLHHVPLKCVSKSHPLFQEFRLWQFLSNLRIYQRERMMDGSLKLDVDVTREFLPSEEDYVKLFDWLNERKEISQKFLLAYKPFGLKKNEQANYRWNYVEDKSYPCNETRAEIKSRLSKAGVPEEFLTEEKEEALWHILYSISDKKELTKALGTFAAKNCLNESFVEVFAKIPPFESNYAAYSLKAIRKLLALMRMGKYWNEQAIDRQTRDRIEKILTGEYDETIRSRVREKAMLLTDISSFRGLPLWLACYIVYDRHSESKELVKWETPADIDHFLSKFKQNSLRNPIVEQVITESLRTVRDIWKQEGKIDEIHVELGREMKNPAKERARITAQVQENENTNLRIKALLAEFMNPEFEIENVHPYSPGQQEILRIYEDGVLSGIAEKDLPDDITAILKKFRENDVKKRPTTSEVLRYKLWLEQRYRSPYTGRVIPLGKLFTPAYEIEHVIPQSRYFDDSISNKVICESAVNKLKDNCLGYEFIKKHSGEMVELGNGETVPVFSVEEYERFVKESYFGNSKKMKKLLLEDIPDSFIERQLNDSRYISRVVTSLLSNLVCEEGEQDGLSKNVIVCTGGITDRLKKDWGVQEVWNRIILPRFLRLNEITGRTDFTSTSVNGHLLPALPLYLQKGFNKKRIDHRHHAMDAIVIACANRNIVNYLNNSSARKNSEISRYDLQRLLCEKVKTDANGNYKWILRKPWETFTQDVYAALTNIVVSFKQNLRVINRTTNYYQHYNEAGEKRMIPQTKGDRWAIRKPMHKDTVYGEVNLRKEKTLPLRDVVKNPSIVVDKSLKNKLYELLKSQYDLKAIAKYFETHQDVWADVNLKKIKVYYFTKETNERFFATRKSLDPSFDQKKIEEEVTDTGVQKILLHHLQQNNNDPDMAFSPDGIDRMNQNMTILNDGKWHQPIYKVRTYEKADKFAVGESGNKAKKFVEAAKGTNLFFAVYESVQEDEAIGKQVCKRTFATIPLNEVIKRKKQGLPAAPEDLNGNLPKFVLSPNDLVYLPTEEERNSSRIIQPLDRERIYKMVSSSGSQCFFIKVFVANSIWDKNEYSSLNKMERAITNEMIKEICVPIKIDRLGNVSLIQI

SEQ ID NO: 84 - protein, 1219 aa, Bacteroides cellulosilyticus
MKEEVRGKNRSQTWAILAKFFVWSEKESVWNEKEARTEERVKEYKLVGLKRDTKGNELKLENYRWRVQALSEQLNPEIVAIVLQEINGQISASSGYLGAISDRSKQLYFNRQTVGQYLMSELEKDPNVSLRNRVFYRQDYLDEFDRIWEKQAEFHEELTVELKKEIRDIIIFYQRRLKSQKGLISFCEFEKREVVVEEDGRKKNKTVGCRVIPRSHPLFQEFKIWQTLNDIEVFAWDKQSKRKKADKSSILFDNSEDALLVEGKRFLYQEEKELLAKELFVKESMKKAEVLKLLFENYQELDLNFKQIDGNHTGFALFSAYSKMIEKYGYEPVDFKRSADEIIEKLETIFTNLGWNTELLSIDLSKEDKELERQSYFRLWHLLYSFEGDNTPTGNGKLLEKIMQLCDVEKEYAVELANVSFQEDYGSLSAKAIKKILPYLKEGNQYDVACDYAGYRHSRSSLTKDEIENKILKDKLEILPKNSLRNPVVEKILNQMVNLINTLIDTYGKPDEIRVELARELKKNAKEREELTKSIARNTREHDEIRQLLRTEFGMMNVSRNDIIRYKLYEELKDNGYKTLYSNEYIPREKIFSKEIDIEHVIPQARLFDDSLSNKTLEYRAINIEKGNKTAYDFVKEKYGNDGLEKFLNRCETLFKDKRTKLRKLKMEEKDIPEGFIDRDLRNTQYISKKAFAMLNEISRRVVATTGSITDKLREDWQLVDLMKELNLPKYEKLGMVEMFEDKDGRKIKKITDWTKRNDHRHHAVDALTVAFTKDVFIQFYNNKNAAWMPASKEHANITGIKARYFENGKALAPMPLAQFRAEAKRHLENLLVSIKAKNKVITSNVNRTKNKNGENRKLQQTPRGQLHLETVYGSHRQYATKIEKVNAAFDVTKIATVSKLAYRNALLKRLEAFGNDPKKAFTGKNTLEKNPLYLDENQTEMVPEKVQTVEFETVYTIRKPIDPNLSIDKVVDVKIRSVLEKRLKEYGGDAKKAFVNLDENPIWLNEAKGISIKRVSIRGISNAQSLHEKKDKDGNLILGKEGRKIPVDFVNTGNNHHVAIYKKPVLDKVGQVVLDEEGNPKYELDEVVVSFFDAVTRANLGQPIIDKDYRRSEGWQFLFSMKQNEYFVFPNDKTGFNPKEVDLLNPENYALISPNLFRVQKFAYKNYVFRHHLETTIKDTSSTLKGITWTDFRSSKGLDKIVKVRVDHIGQIVSIGEY

SEQ ID NO: 85 - protein, 1329 aa, Catenibacterium mitsuokai
IVDYCIGLDLGTGSVGWAVVDMNHRLMKRNGKHLWGSRLFSNAETAANRRASRSIRRRYNKRRERIRLLRAILQDMVLEKDPTFFIRLEHTSFLDEEDKAKYLGTDYKDNYNLFIDEDFNDYTYYHKYPTIYHLRKALCESTEKADPRLIYLALHHIVKYRGNFLYEGQKFNMDASNIEDKLSDIFTQFTSFNNIPYEDDEKKNLEILEILKKPLSKKAKVDEVMTLIAPEKDYKSAFKELVTGIAGNKMNVTKMILCEPIKQGDSEIKLKFSDSNYDDQFSEVEKDLGEYVEFVDALHNVYSWVELQTIMGATHTDNASISEAMVSRYNKHHDDLKLLKDCIKNNVPNKYFDMFRNDSEKSKGYYNYINRPSKAPVDEFYKYVKKCIEKVDTPEAKQILNDIELENFLLKQNSRTNGSVPYQMQLDEMIKIIDNQAEYYPILKEKREQLLSILTFRIPYYFGPLNETSEHAWIKRLEGKENQRILPWNYQDIVDVDATAEGFIKRMRSYCTYFPDEEVLPKNSLIVSKYEVYNELNKIRVDDKLLEVDVKNDIYNELFMKNKTVTEKKLKNWLVNNQCCSKDAEIKGFQKENQFSTSLTPWIDFTNIFGKIDQSNFDLIENIIYDLTVFEDKKIMKRRLKKKYALPDDKVKQILKLKYKDWSRLSKKLLDGIVADNRFGSSVTVLDVLEMSRLNLMEIINDKDLGYAQMIEEATSCPEDGKFTYEEVERLAGSPALKRGIWQSLQIVEEITKVMKCRPKYIYIEFERSEEAKERTESKIKKLENVYKDLDEQTKKEYKSVLEELKGFDNTKKISSDSLFLYFTQLGKCMYSGKKLDIDSLDKYQIDHIVPQSLVKDDSFDNRVLVVPSENQRKLDDLVVPFDIRDKMYRFWKLLFDHELISPKKFYSLIKTEYTERDEERFINRQLVETRQITKNVTQIIEDHYSTTKVAAIRANLSHEFRVKNHIYKNRDINDYHHAHDAYIVALIGGFMRDRYPNMHDSKAVYSEYMKMFRKNKNDQKRWKDGFVINSMNYPYEVDGKLIWNPDLINEIKKCFYYKDCYCTTKLDQKSGQLFNLTVLSNDAHADKGVTKAVVPVNKNRSDVHKYGGFSGLQYTIVAIEGQKKKGKKTELVKKISGVPLHLKAASINEKINYIEEKEGLSDVRIIKDNIPVNQMIEMDGGEYLLTSPTEYVNARQLVLNEKQCALIADIYNAIYKQDYDNLDDILMIQLYIELTNKMKVLYPAYRGIAEKFESMNENYVVISKEEKANIIKQMLIVMHRGPQNGNIVYDDFKISDRIGRLKTKNHNLNNIVFISQSPTGIYTKKYKL

SEQ ID NO: 86 - protein, 1152 aa, Roseburia inulinivorans
MNAEHGKEGLLIMEENFQYRIGLDIGITSVGWAVLQNNSQDEPVRITDLGVRIFDVAENPKNGDALAAPRRDARTTRRRLRRRRHRLERIKFLLQENGLIEMDSFMERYYKGNLPDVYQLRYEGLDRKLKDEELAQVLIHIAKHRGFRSTRKAETKEKEGGAVLKATTENQKIMQEKGYRTVGEMLYLDEAFHTECLWNEKGYVLTPRNRPDDYKHTILRSMLVEEVHAIFAAQRAHGNQKATEGLEEAYVEIMTSQRSFDMGPGLQPDGKPSPYAMEGFGDRVGKCTFEKDEYRAPKATYTAELFVALQKINHTKLIDEFGTGRFFSEEERKTIIGLLLSSKELKYGTIRKKLNIDPSLKFNSLNYSAKKEGETEEERVLDTEKAKFASMFWTYEYSKCLKDRTEEMPVGEKADLFDRIGEILTAYKNDDSRSSRLKELGLSGEEIDGLLDLSPAKYQRVSLKAMRKMQPYLEDGLIYDKACEAAGYDFRALNDGNKKHLLKGEEINAIVNDITNPVVKRSVSQTIKVINAIIQKYGSPQAVNIELAREMSKNFQDRTNLEKEMKKRQQENERAKQQIIELGKQNPTGQDILKYRLWNDQGGYCLYSGKKIPLEELFDGGYDIDHILPYSITFDDSYRNKVLVTAQENRQKGNRTPYEYFGADEKRWEDYEASVRLLVRDYKKQQKLLKKNFTEEERKEFKERNLNDTKYITRVVYNMIRQNLELEPFNHPEKKKQVWAVNGAVTSYLRKRWGLMQKDRSTDRHHAMDAVVIACCTDGMIHKISRYMQGRELAYSRNFKFPDEETGEILNRDNFTREQWDEKFGVKVPLPWNSFRDELDIRLLNEDPKNFLLTHADVQRELDYPGWMYGEEESPIEEGRYINYIRPLFVSRMPNHKVTGSAHDATIRSARDYETRGVVITKVPLTDLKLNKDNEIEGYYDKDSDRLLYQALVRQLLLHGNDGKKAFAEDFHKPKADGTEGPVVRKVKIEKKQTSGVMVRGGTGIAANGEMVRIDVFRENGKYYFVPVYTADVVRKVLPNRAATHTKPYSEWRVMDDANFVFSLYSRDLIHVKSKKDIKTNLVNGGLLLQKEIFAYYTGADIATASIAGFANDSNFKFRGLGIQSLEIFEKCQVDILGNISVVRHENRQEFH

SEQ ID NO: 87 - protein, 686 aa, Coprococcus comes
MKKQDSPKNNMGYTAYNLNVLGYEEFAKRVELLFKDTDAVKRLNDSHMQMAEGFDLNALPGSPALRRGVSQAIKVLDDIVSVAGKAPDRIYLKVTRTASNSRKGKRTAKRSDKIKQALKALDADAAADLGAAKLLRELGMFDEKEINERIYLYFHQAGKCLYTGKPIDITRIASNDYYVDHVVPLAYRKDESLDNKVLVYAEASRYKSETLLVSPAVQRKMLPFWRMLRNAGLMSERKLNALIRTEISEGMLKSIIGRQFTENSWEAKLFTAAIAAKYPGTVVIPVKAGVIGAVRSRIGIPKSLKANQFYHAHDALLAAEVGRYMELAKPAFVHNRVKYEQYMRKIKLVNEENKKAPKSQLDFFAGGFFFDRVDKDTGEVYWNKDEEVERIYRACGWKNLRVTYAAFEDGGAFWKQTIYSPREKSKLIATKSDRPAEIYGGYSSQTFANFFVYEVMKKKVKQLRFGAVPAAIASKSDPDTYNAMLEMYARGLAKTAKEKFVRIVRARVLKNTMIELYGERFRIAGEKQVYPVRQMPLAIDEVYLLKGVETIAAAGNAGASAKIDFEKAAESLVGFWDLLLEKLPVNYPKLTVQLKLGLLKHPKDILAATSESEFPAIVYKIAEAEIQVMEQASGLRNMSDTKILGGNTFGGSLVFTFNKVLNDPKSKACFIDTTPAGLYEVKTKIW

SEQ ID NO: 88 - protein, 1105 aa, Actinomyces coleocanis
MDNKNYRIGIDVGLNSIGFCAVEVDQHDTPLGFLNLSVYRHDAGIDPNGKKTNTTRLAMSGVARRTRRLFRKRKRRLAALDRFIEAQGWTLPDHADYKDPYTPWLVRAELAQTPIRDENDLHEKLAIAVRHIARHRGWRSPWVPVRSLHVEQPPSDQYLALKERVEAKTLLQMPEGATPAEMVVALDLSVDVNLRPKNREKTDTRPENKKPGFLGGKLMQSDNANELRKIAKIQGLDDALLRELIELVFAADSPKGASGELVGYDVLPGQHGKRRAEKAHPAFQRYRIASIVSNLRIRHLGSGADERLDVETQKRVFEYLLNAKPTADITWSDVAEEIGVERNLLMGTATQTADGERASAKPPVDVTNVAFATCKIKPLKEWWLNADYEARCVMVSALSHAEKLTEGTAAEVEVAEFLQNLSDEDNEKLDSFSLPIGRAAYSVDSLERLTKRMIENGEDLFEARVNEFGVSEDWRPPAEPIGARVGNPAVDRVLKAVNRYLMAAEAEWGAPLSVNIEHVREGFISKRQAVEIDRENQKRYQRNQAVRSQIADHINATSGVRGSDVTRYLAIQRQNGECLYCGTAITFVNSEMDHIVPRAGLGSTNTRDNLVATCERCNKSKSNKPFAVWAAECGIPGVSVAEALKRVDFWIADGFASSKEHRELQKGVKDRLKRKVSDPEIDNRSMESVAWMARELAHRVQYYFDEKHTGTKVRVFRGSLTSAARKASGFESRVNFIGGNGKTRLDRRHHAMDAATVAMLRNSVAKTLVLRGNIRASERAIGAAETWKSFRGENVADRQIFESWSENMRVLVEKFNLALYNDEVSIFSSLRLQLGNGKAHDDTITKLQMHKVGDAWSLTEIDRASTPALWCALTRQPDFTWKDGLPANEDRTIIVNGTHYGPLDKVGIFGKAAASLLVRGGSVDIGSAIHHARIYRIAGKKPTYGMVRVFAPDLLRYRNEDLFNVELPPQSVSMRYAEPKVREAIREGKAEYLGWLVVGDELLLDLSSETSGQIAELQQDFPGTTHWTVAGFFSPSRLRLRPVYLAQEGLGEDVSEGSKSIIAGQGWRPAVNKVFGSAMPEVIRRDGLGRKRRFSYSGLPVSWQG

SEQ ID NO: 89 - protein, 1361 aa, Anaerococcus tetradius
MGNYYLGLDIGTNSVGWAVTDENYNIERFKKKNMWGIRLFDEAKTAESRRIHRQARRMRQRKIQRLNLLMELFDVEISKVDESFFIRKKESDLHYEDKSQDSRYALFNDKEFNDKDYHNKYPTIFHLIMDLIENDEKKDIRLLYLACHYLIKNRGHFIFEGQKFDVNSSLNNNINKLKSHLDQFYNICLDFDNDKLIEILVNQNLNISEKSKKIKELLRKTNLEVGIANLIAGGSIKLSNMFDDDELKNLDYNSLSFKNSNFDEGRELFEEVLEDRFELVEILKDIHDASVLETMLSSASISPDGGKYISSSMINSYNKHKRDLKLLKKIIKKYKKSEYDNIFRDENIKNNYLSYTRTGINKNKKVQAEDNTDSDGFYKYIVKILKDIKENDSDEDIKYILSEIDKKNFVPKQRTKENSVIPYQLREIELRKIIDNQSKYHKFLNEVDEKGISVKEKIISLLTFRIPYYIGPLNPSYNEEKNFTTSWVKRLAKGKVTPWNFEDMVDIDASREAFIENKLNKCSFLLDETVLPKDSLLYQEYMVLNELNNLKINGQSINTDLKKSIYEELFKKYKKVTRKRLISYIKEKENMSGDIVITGIDGDFKQGLKSYIAFKDIIGEKIDDDIYRKEVEKIIRDISLYGDDKSFIQKKIKNENKLDLSDDQISKIAKLKFKDWGRFSKKLLVGIKASDKNTGEIDNIIGFMRNYNYNIMQLMANVFTFKDEIEKLNSKYYTDEKINIDYLDDLYLSSPAKRMLWQSFQIVDEIKNIKNSDPKKIFIEMARSKEDKPTRKMSRKSRLEKLYTDSKKQFIKLFGPDEYDKLNNEIKNKSESDFRWDNLYLYYTQFGRCMYSLDPIDLEELSNKNLYDQDHIYPKSKIYDDSIENRVLVKKQLNLDKSNEYPIPDRVLNKDKNKLLAFWKMLNEKELIGDKKYARLIRKSPFTDEELGDFIARQLVETRQATKETANMLKRLCPDSKIVYVKAKNVSDFRRKFDILKCRSINDLHHAHDAYLNIVVGNVFDTKFTSNPLNFIKNNSKNRSYNLEKIYDYDVIRNEKIAWLAERKEENQDGSIATVLKNLSKNDIRVTRRTYIKCEDLFDENIVRKGNGKFPIKENNNKSDTNKYGGYSGIKNAYFVLLEDEKHNRILEAIPSFIYKKEKNGEKGSVINYLQNILGIKSAKILRDKIKIGSLLKIDKFPYNLAGKSGNGILISGGVQLILDKNTSKYIKKIENYKYKLDENKDYQINIFDKLSKEENIKLFDLFVDKFENSIYKNRVNIKLKEIKLARPKFEHLSIEEQIKTLTQMLILFGRENNAVNLEYIGLPKNTGKTKINKKINNKDIKIINQSITGLYETEEDLANI

SEQ ID NO: 90 - protein, 1377 aa, Lactobacillus brevis
MESNHDGEQVKYTLGLDIGTSSIGYAAIDKHQKPIRAKGKHVIGVRLFQEGQTAADRRAFRTTRRRLKRRKWRLNLLNRLFDPYLSEVDPNFLPRLRQSNLSPKDDNKHFNGSTLFPDKTDAAFYRQYPTMYHLRYALMTEKRKFDIREVYLAIHHIVKYRGNFLNSATVDSFKTSNIDFTSQFDRLNELYRQVILDEPFQINMDQVDEMTNKLLDNDALKLDTQKQVAKLLPVIYNDKPIDKQYTRIATEFSKAILGYKTKLDVILNLDTQNAKDWVIRLDDEDIDDKLPALVENLDESRQEIVTIIRDLYAQITLNAIVPKGKSLSESMVDKYNDHKDHLDLLMGLIHELGDDSAKGIKLREAYTQYVGKSDDKTLNQDDFYAAIKKNLDEDSKRSPKIQRLIEQASFMPKQRTSANGVIPHQLHQLELDRIIENQGRYYPFLKKPNPNTHKPNGGKYKLDELVAFRIPYYVGPLITKRDQEKTSGADFAWMIRKPGQEGEITPWNFDQKVDRMASANRFIRRMTTKDSYLVAEDVLPDASLIYEKFKALNELNMLKVNDSRLSPSQKQDLFNNLFKKQKTIRTKKLQTYIRTNWELPSVMISGLADPDKFNSSLSTYIDFRDIFGEKVDDPNRQADYEEIIEWSTVFEDRKIYQAKLNQLDWLTEPQRKALLTKRYTGWGRLSKKLLTGLKDQNGDSILDQLWKTNDNFMQIQSRDEFAKQIHDENAKQFHEANNVDDILDDAFTSPQNKKAIRQVDKVVQDVVKAVGYAPDKIAIEFTRSLENNPQRTVSRQRQLQAAYKNIPREIMKSGLMAELGSVADSKKVLSDKLYLYFTQMGKDMYEDKTINIDNLPNYDIDHILPQAFIKDDSIDNRVLISKEENARKSNRVPLKFFGAKRMGFWKDLLNNGLISNRKFQNLTTDPEKISKYSAKGFIHRQLVETSQVIRLVANILGNEYSQAGTTIIEVSAKMNRQLREDFHLIKNRNVNDYHHAMDAYLTAYVGDYLYLRYPKLRPYFVYGDFKKAEDQDLNIRNFNFLHDLKDNESLDKIVDSETGEIVWEKHGSVKQLKKVYHYKFMLVSQEVYTRQDALFNQTIYPASDADKRKLIPIKNSKPVDVYGGYSGNIDAYMAIVRVHGKKEDNYKVVGIPMRAVTKLKKAEKEGHDSYLNAVHEVLKPQFTKKKKNRKTGEITETVDEFDVLLGKVYYRQLIVDGNKKFMLGSSSYQYNAKQLVLSDKAMQVLSKNGKVKSQDENQNLIDVYDEILEKVDQYFELYDQRHYRESLHKGRGIFVNLPLSNQYDGSKLTSYGKYETIDAILNGLHANATMSNLRYLGISSPFGKMQASNGLTIDPDSIICYQSPTGLFERQIKLSDL

SEQ ID NO: 91 - protein, 1239 aa, Lactobacillus buchneri
MTEKRKFDIREVYLAIHHIVKYRGNFLNSATVDSFKTSNIDFTSQFDRLNELYRQVILEEPFQINMNQVDKMTNKLLDNDALKLDTQKQVAKLLPVIYNDKPVDKQYTRLATEFSKAILGYKTKLDVILNLDTQNAKDWAIRLDDEDIDDKLPALVENLDESRQEIVTIIRDLYAQITLNAIVPKGKSLSESMVDKYNDHKDHLDLLMGLIHELGDDSAKGIKLREAYTQYVGKSGDKTLNQDDFYAAIKKNLDEDSKRSPKIQRLIEQASFMPKQRTSANGVIPHQLHQLELDRIIENQGRYYPFLKEPNSNTHKPNGGKYKLDELVAFRIPYYVGPLITKQDQEKTSGADFAWMIRKPGQGGEITPWNFDQEVDRMASANTFIRRMTTKDSYLVAEDVLPDSSLIYEKFKVLNELNMLKVNDRRLSISQKQDLFNNLFKKQKTIRTKKLQTYIRTKWELPSVMISGLSDPDKFNSSLATYIDFRDVFGEKVDDPNRQADYEKIIEWSTVFEDRKIYQAKLNQLDWLTESQSKALLTKHYTGWGRLSKKLLTGLKDQNGDSILDQLWKTNDNFMQIQSRDEFAKQIHDENAKQFHEANNVDDILDDAFTSPQNKKAIRQVDKVVQDVVKAVGYAPDKIAIEFTRSPQDRPQRTFSRQRQLQSTYLNVAKALMKSNLNQELKSVIDSQQTLTDKLYLYFTQLGQDMYTGKEINFDELVNYQIDHILPQAFIKDDSLDNRVLVSAPINNAKSDNVPVKKFGAKMGYFWKQLAENHLISKRKLNNLTTDPDKIGKFTAQGFIHRQLVETSQVIRLVANILGNEYGHDGTTIIEVTAKMNHQMRKDFDLIKIRDVNDYHHAMDAYLTAYVGDYLYLRYPKLRSYFVYGDFKKLKDQSLKIRNFNFLHDLTNDEAGDKIVDQETGEIIWDKHESVKQLKKVYHYKFMLVSQEVYTRQDALFNQTIYPASDADKRKLIPIKNNKPVDVYGGYSGNVDAYMAIVRIHGKKEDKYKVVGVPMRAVADLKKAESKGRDNYLNAVHEVLKPQFTKKKKDRKTGEITEMMDDFDVLLGKVYYRQLIVDGNKKFMLGSSTYQYNAKQLVLSDKAMQVLSKDDKLKNQDENQNLIDVYDEILEKVDQYFELYDINKFRQKLHDGRKKFIELPVDNDFNGKKLISYGKRATIISILNGLHANATMSNLKYLGISSPFGMLQVPNGIILSPASRICYQSPTGLFERKVKLSDL

SEQ ID NO: 92 - protein, 1381 aa, Lactobacillus fermentum
MDYVKEYHIGLDIGTSSIGWAVTDSQFKLMRIKGKTAIGVRLFEEGKTAAERRTFRTTRRRLKRRKWRLHYLDKIFAPHLQEVDENFLRRLKQSNIHPEDPAKNQAFIGKLLFPDLLKKNERGYPTLIKMRDELPVEQRAHYPVTNIYKLREAMINEDRQFDLREVYLAVHHIVKYRGHFLNNASVDKFKVGRIDFDKSFNVLNEAYEELQNGEGSFTIEPSKVEKIGQLLLDTKMRKLDRQKAVAKLLEVKVADKEETKRNKQIATAMSKLVLGYKADFATVAMANGNEWKIDLSSETSEDEIEKFREELSDAQNDILTEITSLFSQIMLNAIVPNGMSISESMMDRYWTHERQLAEVKEYLATQPASARKEFDQVYNKYIGQVPKEKGFDLEKGLKKILSKKENWKEIDELLKAGDFLPKQRTSANGVIPHQMHQQELDRIIEKQAKYYPWLATENPATGERDRHQAKYELDQLVSFRIPYYVGPLVTPEVQKATSGAKFAWAKRKEDGEITPWNLWDKIDRAESAEAFIKRMTVKDTYLLNEDVLPANSLLYQKYNVLNELNNVRVNGRRLSVGIKQDIYTELFKKKKTVKAGDVASLVMAKTRGVNKPSVEGLSDPKKFNSNLATYLDLKSIMGDKVDDNRYQMDLENIIEWRSVFEDGEIFADKLTEVEWLTDEQRSALVKKRYKGWGRLSKKLLTGIVDENGQRIIDLMWNTDQNFMQIVNQPVFKEQIDQLNQKAITNDGMTLRERVESVLDDAYTSPQNKKAIWQVVRVVEDIVKAVGNAPKSISIEFARNEGNKGEITRSRRTQLQKLFEDQAHELVKDTSLTEELEKAPDLSDRYYFYFTQGGKDMYTGDPINFDEISTKYDIDHILPQSFVKDDSLDNRVLVSRAENNKKSDRVPAKLYAAKMKPYWNQLLKQGLITQRKFENLTMDVDQNIKYRSLGFVKRQLVETRQVIKLTANILGSMYQEAGTDIIETRAGLTKQLREEFDLPKVREVNDYHHAVDAYLTTFAGQYLNRRYPKLRSFFVYGEYMKFKHGSDLKLRNFNFFHELMEGDKSQGKVVDQQTGELITTRDEVAKSFDRLLNMKYMLVSKEVHDRSDQLYGATIVTAKESGKLTSPIEIKKNRPVDLYGAYTNGTSAFMTIIKFTGNKPKYKVIGVPTTSAVGLKRVGKPGSESYNQELHRIIKSNPKVKKDFEIVVPHVSYSQLIVDGDCKFTLASDTYQHPATQLVLSKESMEIIADDFKFVKENPATADEQLVRVFDEIVNQMNHYFTIFDQRSNRQKVTKARDKFVSLPTESEYEGAKKTQVGKTEVITNLLMGLHANAAQGDLKVLGLSTFGFFQSSGGLNLSEDAMIVYQSPTGLFERRICLKDI

SEQ ID NO: 93 - protein, 1306 aa, Sphingobacterium spiritivorum
MKHILGLDLGTNSIGWALIKQNFENKQGEILGMGSRIIPMGAELSKFEQGQAQTKNANRRIARGTRKLNKRYKQRRNKLIYILQGLGMLPDQIKLVNQFSDPNKLDKISILPISKNQQQLTAFDLLELRVKALTEKIELEELGKVIYKYNQLRGYSGGNSEPEKEENNEDESEENEKTNDSFVVFSKVLSLGLPEEITFKGKKLSKRKIAIETEDGIIEAETFLDSLKENDSLELHVNIRRAKSGDTITIKLPSKTSWRKKMENIEKQLADKSKELGREYFISELLFDILKENKWAKIRNNVILRSRYESEFDAVWSEQSKYYPILNHLETDRLQKILEFIFPGQKESQEKLRQTGLKEGLKYVIKNQVVFYQRELKDQSDLISNCRYEPTEKVVAKSHPVFQEYKIWEQINKLVINTKIENGVNRKGEIRYKYIDKPIPVALKEWLYEELQSKKEVSFNPILTKLKKEFKLRENVDFLNGMNAKDKLKGNETKVILQKALGELWNIFGLDDSERQVELWEILYNGKGNEYDLTSERTSNILAFIEKYSPDLENKNDVAIKISKIKFSRNYSNLSLKAIDNILPLVRAGKFFDQNFSEALSHKIVKLLNENVEDPFEKSAQEFLDKNQDVLSDGGIVNAIATILVYDKHTAKEYSGDELIKEFTQISRLKQGELRNPLAEQIINEALVIVRDIWRKYGFKPDEIRVELARELKNNAVERGKMYSANLKSQKHNAEIRNKLIELKQEISIANIEKYKLWVSQENLQEVYLKNYNDPSKSEIEKLKLWESQGHISPYTGQPISLSELFNRERYDVDHIIPQSRYFDDSLSNKVICEKSINNEKGNRTSMEYFEVGSVNYRIFTKDQFIDHANKYFSGKKRKNLLATSIPEDPIQRQIKDTQYISIRIREELNKIVGNENVKTTTGGITDYLRNHWGLTDKFKVLLKERYEAVLPKIAQLEYDNYKKETEKKFTEYKNADVEFNEPILDEEIFIEKFRSEFIRKKNNKLIIKGWSKRIDHRHHAMDALVIACTQPAHIKRLNDLNQVLKEWLDKNKEKFFPGFSGTKTELLDEVLNLEEEKRREIFNQLEKFRAIEMPWKGFPEEAEQKLKEVIVSHKPKDKLLLQYDIQGNKQIKLRGQLHEGTLYGLSNGKEIYRIPINKLAGKQFATEKTIEKIVNPFLKNVIEEHLKSFGKKEEAFSAEGILDLNKKLAERKDEQQNPKPHPPISTIKIYYKDPSKSKKKKTDDEDDISLQKLNRKKSFNDSLYVKTGDNYLFAVMEKEVFNKKLNKDKTERHYDLKLFLTLLIF

SEQ ID NO: 94 - protein, 1358 aa, Acidaminococcus sp.
MGKMYYLGLDIGTNSVGYAVTDPSYHLLKFKGEPMWGAHVFAAGNQSAERRSFRTSRRRLDRRQQRVKLVQEIFAPVISPIDPRFFIRLHESALWRDDVAETDKHIFFNDPTYTDKEYYSDYPTIHHLIVDLMESSEKHDPRLVYLAVAWLVAHRGHFLNEVDKDNIGDVLSFDAFYPEFLAFLSDNGVSPWVCESKALQATLLSRNSVNDKYKALKSLIFGSQKPEDNFDANISEDGLIQLLAGKKVKVNKLFPQESNDASFTLNDKEDAIEEILGTLTPDECEWIAHIRRLFDWAIMKHALKDGRTISESKVKLYEQHHHDLTQLKYFVKTYLAKEYDDIFRNVDSETTKNYVAYSYHVKEVKGTLPKNKATQEEFCKYVLGKVKNIECSEADKVDFDEMIQRLTDNSFMPKQVSGENRVIPYQLYYYELKTILNKAASYLPFLTQCGKDAISNQDKLLSIMTFRIPYFVGPLRKDNSEHAWLERKAGKIYPWNFNDKVDLDKSEEAFIRRMTNTCTYYPGEDVLPLDSLIYEKFMILNEINNIRIDGYPISVDVKQQVFGLFEKKRRVTVKDIQNLLLSLGALDKHGKLTGIDTTIHSNYNTYHHFKSLMERGVLTRDDVERIVERMTYSDDTKRVRLWLNNNYGTLTADDVKHISRLRKHDFGRLSKMFLTGLKGVHKETGERASILDFMWNTNDNLMQLLSECYTFSDEITKLQEAYYAKAQLSLNDFLDSMYISNAVKRPIYRTLAVVNDIRKACGTAPKRIFIEMARDGESKKKRSVTRREQIKNLYRSIRKDFQQEVDFLEKILENKSDGQLQSDALYLYFAQLGRDMYTGDPIKLEHIKDQSFYNIDHIYPQSMVKDDSLDNKVLVQSEINGEKSSRYPLDAAIRNKMKPLWDAYYNHGLISLKKYQRLTRSTPFTDDEKWDFINRQLVETRQSTKALAILLKRKFPDTEIVYSKAGLSSDFRHEFGLVKSRNINDLHHAKDAFLAIVTGNVYHERFNRRWFMVNQPYSVKTKTLFTHSIKNGNFVAWNGEEDLGRIVKMLKQNKNTIHFTRFSFDRKEGLFDIQPLKASTGLVPRKAGLDVVKYGGYDKSTAAYYLLVRFTLEDKKTQHKLMMIPVEGLYKARIDHDKEFLTDYAQTTISEILQKDKQKVINIMFPMGTRHIKLNSMISIDGFYLSIGGKSSKGKSVLCHAMVPLIVPHKIECYIKAMESFARKFKENNKLRIVEKFDKITVEDNLNLYELFLQKLQHNPYNKFFSTQFDVLTNGRSTFTKLSPEEQVQTLLNILSIFKTCRSSGCDLKSINGSAQAARIMISADLTGLSKKYSDIRLVEQSASGLFVSKSQNLLEYL

SEQ ID NO: 95 - protein, 653 aa, Oribacterium sinus
MELINSEEFTFKEELEKHTQVAMKQLSEFTYEDLEDSYFSVPVKRMIWQTLLVVREIEKVMGYAPKRIFVEMTRTEEEKGDKGRKESRGNQLLELYKSIKNTDSHNWKEEIAAADKDGKLRSKKLFLYYMQMGRDMYTGEEIDLGRLYDDNLYDIDHIYPRHYVKDDSIMNNLVLVNRRANQDIKKDLYPIPEQIKANPNVHMLWDALHKQKLITDEKYARLTSNTAFSEKQLGDFIARQLVETGQGTKGVADLLEQLFKDTVIVYAKASNVSDFRRDNGFLKSRLVNDFHHAQDAYLNIVVGNVYYTKFTKNPWNFICKDYEKDKEKNRYNLARMFDWNVVRGSETAWIVERKDEKGTISTVRKMMQKNTPLLTRMNFEQHGSIANATLYSAKKAKSENYLPLKTADEKMSDVKKYGGYTSMSIAYYFIVHHKEDKKENVTIEALPLYCKDKVEREENGLEKYCEEVLGYGEVNIIRRKLKIQSLLEFNGYQVHLSGKTGNQLILRNAISLCLSTKWITYIKKLEKAVNIQIVEEVVTPEENIKLYNLLADKHANTVYSKRPNAYGEKLLADREIFVTLEFGKQCEALLQILSLTKIGSTEANLLLIGESEHSGKILISKNLKASDRPAVINQSPCGLYEKKEWIFDKIVEK

SEQ ID NO: 96 - protein, 1436 aa, Capnocytophaga gingivalis
MKYIKYILGLDIGSNSIGWALIQLDLLQKTKRIIAAGSRIIPMDQKVLSDFGKGITISPTAQRTSYRNARHCRERHLLRRERLHRVLHILGFLPTHYDKQIDFSKRYGKFVDNTEPKIAYNEGKFLFMDSFQEMLSDFKSHQPDLFYTKKNGEESKIPYDWTIYYLRKKALSQKISKEELAWIILNFNQKRGYYQLREEEGNKENDFEIISSKIISVIKKDKDKKYNKYWYDIILENGLVYQAAFYNDFVYNWINQDREFIIERTSLKNGAEKVKLSYLPTFDEIDKMDKKEQDKYYKKIKIKTENSIGNKTVGCYIYDHILQNPNEKIKGKLVRTIERKYYKEELKAILEKQIALQPELFTDQLLADCIRELYSKNEAQQRNLAARDFVHLLVEDIIFYQRPLRRQKSTLANCSLESRSYIDKDSHTRKEAPLKVCPKSNPYYQEFRVLQWLQNLKIYEIDSDQEVTHQFIKTLEDKQQLFEFLMAQKEIDCEELLKYFLNQTYPNAKEKALKSELKKWKDTYRWNYVYDIGEKSSKKYPMNETRYELKRHLEKVANLPDDFLSSEVEYLLWHLIYSVKDKVAYEKGLKKFAQKHHLDKDSFVESFKKFNPYPSEYGSFSEKAIRKLLPLMRFGAHWDFNHIDKNTQKRIEDLITGVENEEIRTILREKAEKYQLEKETDFQDLPLWLAQYIVYNRHAEASSLEKWTSVNDLETYLNEFKQHSLRNPIVEQVVMETLRVVRDIWQQYGQGQASFFNEIHIELGRELKKTAKEREKLSKQNQKNEDINLSIKEKLKELEKYNTRAYSITHQEKYKLWLEQKHISPYTGQIISPENLFTDNYEIEHIIPQSRFFDDSLSNKVVCESIVNKAPYKDRQLGLEFIKNQGGRIVKELSKENKTIKIFTEEQYRTFIKEHYSNNPEKTKKLLLEEIPEKMVARQMNDTCYISKFISEILSKIVRSDEQDEGVHSKNVILCTGKITSILRQDWGLNDIWDNLILPRFERMNNLLQKEKFTIYSIEKQKKIPVVPINDQFKSFQKKRIDHRHHAMDAIIIACTTREHINYINNQHALEKEKDKKEKQEERDKLREKLCIKKYNNRSEGNYSWIFKKPWDTFTQEVRVALEDIVVSFKQNLRVINKATNYYERWVEENGKYIKKMVKQEGTNWAIRKPLHEETISGKIYLDREKITKNDILTATRKTVDSSFDDKRIKKITDTGIQKILLNYLKYKGSPEIAFSPEGLEELNKNLSIYNDGKPHKPIYKVRIYEKGSGRFALGEKGRKYKKYVQGASNLYFGIYQGAKRSFATIPLNEVIERQKQGLPSVPEYNEKGDLLLFSLSPNDLVYVPIEGEIIENIDFRNLSKEQKERIYNVNDFSSTCYFTPNRIAKAIFPKEVDLQRKGDKLSGSYDTKTASLEGIQIKEVCIKLKVDRLGNISKA

SEQ ID NO: 97 - protein, 1069 aa, Bacillus cereus
MNYDIGLRIGITSCGWSIINKDLERIEDLGVRVFEKAENPDGTASAAPRREARKSRRKHRRKKHRIERIKRLIVQHDLLSKKELDSLYLSPFNIDVWNLQVEALERKLDNREFARVLIHLVQRRGFQTIRKSVEIQEEGKLLENVSENERIMKVNGYKTVGEMFSKHEKFTHHKRNKDGSYTSVVTRSLLLKEIKTIFNSQRILGNVFSTQKLESDYLYIWGSQRPTLTYEQLMSMVGNCIYEKKEKRAPKTSWAFQYFSLLQKINKLKVSDDNTLRKLSKEERDIVIELAFKKKNVSFVDIRKALKLNDNTKFNHLTYSHVVETKKVEKATFIELKGYHLIKKQLKDRNVELTQELQPKDYDAIAAASTFFKNDIEFRDYLRNQYLDSNGKRKSNIANKVFEDKVIAAVFELNFSKVCHLSFKSLYKLIPHLEKGLDYKEAILCAGYNFRDENKRDKKLFLPVIQQETNPVVHRALTQARKVINAIIREYGSPNTIRFVVANDLAKTYKQRKELESTLKKNRAENEKIKTKLLSMGIINPTGMDIVKYKLWYEQSGICLYTGRQMELSSLFKPGYSIVNHIIPYNRSFDDTYHNRVLTLTETKYEKGNKIPFEYFGAEETCWNEYEKRVSTSKKIHDKKREKLLIRNFDIEYENEMISNNVFDTHYIGSYFEKYIDEHLQFKKSTKKQKVFSIHGNMVAHLHSRWGFNKNSREIYLNHAVDAAIVAVLTDQLIRNIADYYRRDNILEQKGSLKFPEPWKSFSIELEARISPQVRDLIKKLNLDSYLDVDILHIKPVFISKKPRRKVNGEAHKSTIRSLIGINEIGKTVTCIKTRLEDIPFDENGDFPMYGKDTDKYTYTAIKERYLEFNKDKEKAFSTPLYKLKRNGEPGNQIKSVKIIDTRNIVNKVNQGKGIAYNSNIIRVDVFSRDQKYYVVPIYLRDFIKGSLPNKIITAAKGFMQWPETDNSYTFLFSIFPNDLIKVVPKEGKFIKAKNENKENINLTEILGYFKGLDSSTGAFTLESHDGSLLARGIGTKNLLLIEKYQVDVLGRYNKVGNEERQDIKIQQN

SEQ ID NO: 98 - protein, 1391 aa, Lactobacillus jensenii
MKEIKDYIIGLDIGTNSCGYVVTDKQNNILKLKGKTAIGARLFKEGEAAADRRAFRTTRRRLARRRWRLSLLEEIFDEEMNKVDPSFFRRLKESDYSPKDRRKQFNSIVFESSEADKAFYEKYPTIYHLRNALMHDNQKHDLREIFLAVHHIVKYRGNFLREDSVKAFKAAKFTLQGEDGIGPVDKLNDLLKEIYIEAAPELATDNLSKIEDIIKDKKLYKQDKLKQIANLLPKAVDSKDKAKLNKDIAKQVANALMGYMFRLDTLFSFTDVDVKDYKLKFSDANIDESLDALTSLLTDAQIEFVLELQSIYNTIVLNEIVPDGMSLSESMVKKYDDHKKDLKLYKEYIDSLSDQKKAKQLEAAYALYVNYRKADLLAAKKLFEKKKIGDKKFVDVISNFEVFGKFVSDNLDDSELANKIKARLDLGEFLPKQRTNQNGVIPYQLHQVELTQILEKQGKYYPFLITPNPVESHRNNAPYEISELVSFRVPYYVGPLIDNQSIKDKQNKNKFAWMVRQKQGQITPWNFEEMVDTTESANQFIKRMTRKDTYLLAEDVLPKSSLIYQKFMILDELNRIKIDGKKLTSKLKHDIFEKLFKKQKSINLDNLKNYLLAEGNIPGLIEGLSDGINFNNSFSTYIDYRNIFGDEIDNPNKQADFEKMIEWSTVFEDRKIFKRKLKEITWLTPEQIKQVSSKRYSGWGRLSKKLLTQITDENGVNILQRLWNEPETLTEVLANPVIKRKISEANSLFVQINKVENILDDAYTSPQNKKAIRQVIRVVDDIIAAAHGKKPSQIAIEFARSSQNKAKVPDTRKKQLDKIYNKISSEILDSSIKNELKNLKSNKYLSKDKLFLYFKQMGRDAYTGDKLSLDQLQNYDIDHIFPRSFIKDDSLDNRVLTQKPINAKKSDYGIPALEFGNKYVPDLGITVKEMWKLWQENGLISKSKLINLCTNPKKIGSKRASGFINRQLVETSQVIKLVAIILQAEFPDTEIIEVKALQNTTLRESFHLYKNRSVNDYHHAIDAYLTTIVGNYLYQVYPKLRPYFVYGQFKKFNQEKNIDILKRLKNFNFLRQLIFNTDDNIYISGTKEIVFNKKDIIHKLETAYGYKYMNISRECYQETSSLFNQTLYAHNSSVKNSLIPKKKGLPTEIYGGYSGNKDSFFVLVKIVKKRTNLYRIVGIPTRELAKLNSSNNYNQALNKIVESKLCLKETESFKILIKRLLYGTLIVDNGQKFRIGSFKEKHNVQQLVLQLKSMKYIKFYIDGGQNYFTDVERKKLEKQDRDKCLLYVFDDIMNVVNKRFTLFDMSKYEKDGDSLREKFNCLDFNDKVSILSDLLKAFHANSDRTSITKLKITNLGRHQAGKNGITLTTNAQIIYQSPTGLFERRIKIKDL

SEQ ID NO: 99 - protein, 1114 aa, Eubacterium rectale
MNYTEKEKLFMKYILALDIGIASVGWAILDKESETVIEAGSNIFPEASAADNQLRRDMRGAKRNNRRLKTRINDFIKLWENNNLSIPQFKSTEIVGLKVRAITEEITLDELYLILYSYLKHRGISYLEDALDDTVSGSSAYANGLKLNAKELETHYPCEIQQERLNTIGKYRGQSQIINENGEVLDLSNVFTIGAYRKEIQRVFEIQKKYHPELTDEFCDGYMLIFNRKRKYYEGPGNEKSRTDYGRFTTKLDANGNYITEDNIFEKLIGKCSVYPDELRAAAASYTAQEYNVLNDLNNLTINGRKLEENEKHEIVERIKSSNTINMRKIISDCMGENIDDFAGARIDKSGKEIFHKFEVYNKMRKALLEIGIDISNYSREELDEIGYIMTINTDKEAMMEAFQKSWIDLSDDVKQCLINMRKTNGALFNKWQSFSLKIMNELIPEMYAQPKEQMTLLTEMGVTKGTQEEFAGLKYIPVDVVSEDIFNPVVRRSVRISFKILNAVLKKYKALDTIVIEMPRDRNSEEQKKRINDSQKLNEKEMEYIEKKLAVTYGIKLSPSDFSSQKQLSLKLKLWNEQDGICLYSGKTIDPNDIINNPQLFEIDHIIPRSISFDDARSNKVLVYRSENQKKGNQTPYYYLTHSHSEWSFEQYKATVMNLSKKKEYAISRKKIQNLLYSEDITKMDVLKGFINRNINDTSYASRLVLNTIQNFFMANEADTKVKVIKGSYTHQMRCNLKLDKNRDESYSHHAVDAMLIGYSELGYEAYHKLQGEFIDFETGEILRKDMWDENMSDEVYADYLYGKKWANIRNEVVKAEKNVKYWHYVMRKSNRGLCNQTIRGTREYDGKQYKINKLDIRTKEGIKVFAKLAFSKKDSDRERLLVYLNDRRTFDDLCKIYEDYSDAANPFVQYEKETGDIIRKYSKKHNGPRIDKLKYKDGEVGACIDISHKYGFEKGSKKVILESLVPYRMDVYYKEENHSYYLVGVKQSDIKFEKGRNVIDEEAYARILVNEKMIQPGQSRADLENLGFKFKLSFYKNDIIEYEKDGKIYTERLVSRTMPKQRNYIETKPIDKAKFEKQNLVGLGKTKFIKKYRYDILGNKYSCSEEKFTSFC

SEQ ID NO: 100 - protein, 1362 aa, Lactobacillus paracasei
MTKLGKPYGIGVDIGSNSIGFAAVDENSHLIRLKGKTVIGARLFEEGKAAAKRRAGRTTRRRLSRNRWRLSFLRDFFESHITPTDPNFFMRQKYSEISPKDKARYKYEKRLFNDRTDAEFYQQYSTMYHLRNRLMTDPSRADVREIYFAIHHILKSRGHFLTPGDAKDFNTNDVALDEIFPALQDAYAQVYPDLGITFDEDKANEFKTILLNEIATSIDTQRALVKLLLAEEDDKDILKQQKQVLTEFAKAVVGLKTKLNLALGTEVDSSEATAWNFSLGQLDDKWAGIESAMTDEGTEILDQIRDLYRARLLNGIVPTGKTLSQAKVDDYTQHHEDLQLFKAYLKQLEDDGTAKAIRQLYDRYIDGDDAAPFLRENFVKALTKDVTAHPNTKSPELLERLAQPDFMLKQRNKANGAIPVQMQQRELDQIIKNQAVYYDWLAAPNPVEKHRKSMPYQLDELLNFRIPYYVGPLVTAKEQKAAQGGVFAWMVRKDPEGNITPYNFDEKVDREASANTFIQRMKTTDTYLIGEDVLPKQSLLYQRYEVLNELNNVRVNNEKLSIEQKQQVIRELFERHNSVTIKQFAENLRAHGDYAHIPEIRGLADEKRFLSSLSTYRQLKSLLPEAIDDPAKQADIENIIAWSTVFEDAAIFKTKLKEISWLGSEAITKLSNIRYRGWGQFSRKFLNGLTLGNGHTIIQELLLSTNNLMQILTDETLQKKMTELNADKLKTANINDAIDNAYTSPSNKKALRQVLRVVDDIKRAADGQDPSWLYVETADGGGTPGKRTRARQHQLQEIYANAAHELIDTAVRGELEDKISDKADFNDRLVLYFMQGGRDIYTGAPLNIDQLSSYDIDHILPQSLIKDNSLDNRVLVHAIINREKNATFASTIYAQKMNATWRQWHEAGLISGRKLRNLQMRPDQIDKYASGFVARQLVETRQIIKLTEQIVAAQYPDTKIIAVKAGLSHQLREELEFPKNRDVNHYHHAFDAFLAARIGTYLLKRFPNLQAFFTYGKFTKADVKKLRGFNFIRDITHAEDKIVAKDTGEVVWDKQRDVDELDRIYNFKRMLITHEVRFETADLFKQTVYGARDSKEAGGSKQLIPKKKGYPVDIYGGYFRENTAYLAVVKVTKKTETIFKVVKIATSQVAALNKARSRSTAEELSVLTELLKPKFSKVGKNGKITDTPFEVVLPRVPREQLFYNAKYGFFMVNSDTMFHNFQEIWVSRSDQKILQQIRKAKIDYPNVDQDLDNLFHNLADQIVKYFDLYSIAGFKEKISQSQNTFNDLAVDDTDQSVGKITVINELLKGAQANGMTGSLKVLKISTPFGFTQDKSGVLTKDSSIIYQSPTGLFERSVRLTDL

SEQ ID NO: 101 - protein, 1056 aa, Actinobacillus minor
MKALNYILGLDLGIASVGWAVVEIDQNELPIRLIDLGVRTFERAEVPKTGDSLALARRLARSSRRLVRRRAVRLLKAKRLLKQEGILQADDFHSSHLKPLPNNPWELRVKGLNHLLDRKEWAAVLLHLLKHRGYLSQRKNESKTDNKELGALLKGVSENRQLLQAQAFSTPAEIAIKKFQQEEGHIRNQRGAYSHTFDRNDLLAELRLLFQKQREFNNPYTSQSLEQAIAELLMWQKPALSGEAILKMLGKCTFEPSEYKAPKNSYSAEYFVWLTKLNNLRILENGADRGLTAEERQLLINQPFEKAKFTYAQARKLLELSDLAIFKGVRYGKDNAESATLMEMKAWHAIRKALESNGLKTEWNGLKTKPELLDKIGTAFSIYKTDEDISQYLNGELSPAVLNALLENLSFDKFIRLSLQSLAKILPLMEQGLRYDEACKQVYGDHYGKKEQLELRFLPKIPVEDIRNPVVLRTLSQARKVINGVVRLYGSPARIHIETGREVGKSFSERRDISKRQEENRNERQRAVEKFKEFFPHFVGEPKAKDILKMRLYEQQHGKCLYSGKELDLNRLLEKGYVEIDHALPFSRTWDDSFNNKVLVLASENQNKGNQTPYEWLNGKENAERWKLFQALVNGSRFPYSKKQRILTKYLDEDGFRERNLNDTRYVARFLCNFIEDNMQLVGQGKKRVFASNGQITALLRRSWGIQKVREDNDRHHAVDAVVVACSTRALQKKITDYVRYKEMNVFTGEKIDQETGEIIKFHFPEPWKFFRQEVEIRVFSETPAEDVVIALPDRPQANHEFIQPLFVSRAPTRKMTGQGHMETIKSAKRLAEGLSVSRVPLTQLKLKDLENMVNREREKALYEALKVRLEKFNNDPAKAFADPFYKKGGQQVKAVRVEQVQKSGVLVRQENGVADNASMVRVDVFIKGGKYFLVPIYTWQVAKGILPNRAATQGKEEEYWDIMDETAIFQFSLYQNDLIKLVTKKKTIFGYFNGLNRATSNINIKEHDLDKSKGKDGIYLEVGVKLALSLEKYQVDELGKNIQPCRSMKKRPPVR

SEQ ID NO: 102 - protein, 1081 aa, Neisseria flavescens
MTAFKPNPINYILGLDIGIASVGWAMVEIDEEENPIRLIDLGVRVFERAEVPKTGDSLAAARRLARSVRRLTRRRAHRLLRARRLLKREGVLQAADFDENGLIKSLPNTPWQLRAAALDRKLTPLEWSAVLLHLIKHRGYLSQRKNEGETADKELGALLKGVADNAHALQTGDFRTPAELAVNKFEKESGHIRNQRGDYSHTFSRKDLQAELVLLFEKQKEFGNPHISDGLKEGIETLLMAQRPALSGDAVQKMLGYCTFEPTEPKAAKNTYTAERFIWLTKLNNLRILEQGSERPLTDTERATLIDMPYKNKLTYAKARELLGLDDTAFFKGLRYGKDNAESATLMEMKAYHAIRRALEKEGLKDKKSPLSLSPELQDEIGTAFSLFKTDEDITGRLKGCLQPEILDALLKHINFDKFVQISLKALRRIVPLMEQGKRYDEACAETYGDHYGEKNSEEMLYLPPIPADEIRNPVVLRALSQARKVINGVVRRYGSPARIHIETAREVGKSFKDRKEIEKRQEENRKDREKAAAKFREYFPNFVGEPKSKDILKLRLYEQQHGKCLYSGKAIDIRRLNGKGYVEIDHALPFSRTWDDSFNNKVLVLGSENQNKGNRTPYEYLNGKDNSREWLEFKARVETSRFPHSKKQRVLLQKFDEKGFKERNLNDTRYVNRFLCQFVADHMQLTGKGKRRVFASNGQITNLLRGFWGLHKVRAENDRHHALDAVVVACSTVAMQQKITCFVRYKEMNAFDGKTVDKETGEVLHQKTHFPQPWEFFAQEVMIRVFGKPDGKPEFEEADTPEKLRALLAEKLSSRPEAVHEYVTPLFVSRAPNRKMSGAHKDTLRSAKRFVKHNEKISVKRVWLTEIKLADLENMVNYKNGREIELYEALKARLGAYGGNAKQAFDPKDNPFYKKGGQLVKAVRVEKTQESGVLLNKKNAYTIADNGDMVRVDVFCKVDKKGKNQYFIVPIYAWQVAENILPDIDCKGYRIDDSYTFCFSLHKYDLIAFQKDEKSKVEFAYYINCDSSNGRFYLAWHDKGSKEQQFRISTQNLVLMQKYQIDELGKEIRPCRLKKRPPVR

SEQ ID NO: 103 - protein, 1392 aa, Gemella haemolysans
MANKTWYLGLDIGSASVGWAATDTGYKIIRKNKKRLWGVRLFEEAKTAEDRRGYRSSRRRLARRKWRLNLLEELFTSEVKKVDENFFLRLKESQYHYEDKTHKVPYAIFNDKDYTDKDYYKDYPTIYHLRSKLMTEENPDIRKVFLAIHHIIKNRGHFLLQGQSFKDGNLNNLIKELLELDILHVGFEVTEEVVDKIADISLEKKTSKDKLNDIKELYPKEKQLLEVFRLIFGGKTSLDKLFAIDEYKELDAAIKSVSFKEKIYEEVRHDYEQVLSNYIELLDLAKLVYDSIILSDIKKEGKTLSESKVELFEKHRDDLLKLKNLVKNDSKLSEDKKVELYALIFKEDKDKGTNYVNYIRKSEEGKGCNYEDFKKFLVKELAKLEESSVKTEIIKDLELEQFLPLQRTKDNSVVPYQIHKEELVKILDNAARYHSFLNEKDESGYNVREKVIQLLEFRIPYYVGPLNSSKKAKEGGFAWSVRNTGYENTPVTPWNYSKVIDESASAEKFITNLTNKCTYLKGEDVLPKSSLLYSEFALLNELNALKYDGNRISLEARNTIIEKLFKQQGKKVTKTSIKNLLKAEGYIDGKGEITGIDITVKNDLKSYRDFKKILGNKFNSEHVENIILWITLYGESRKLIKAKIESVYGEVYSKDEITKMSRLVYKDWGRFSRKLLTELVSKKLYNEETGECLNIIGAMRQNNILFMELLADRFDYSKQIVEFNKELQEDVTEIAPEILDDLYVSPAVKRSIWQTVRIVEELKKIIGCAPAKIFVETTRSNQEKKKPTDSRKKQLELAYKAVKKDVKELEKEIGTINFDVLNDRLSSVEPSKLKAKKLYLYYTQLGRCMYSEEPINISELFDNNKYDIDHIYPQSKIKDDSFTNTVLVKRESNAAKTDRYPLGSDIQTPSNRRFWKFLKEKGLISDEKYNRLVRTEEFSDEELSGFIARQLVETSQSVKAVASILGELNPETSICYSKAENVSSFRQNFGKIKKGDRDSKNNDQLIKVREINDYHHAKDAYLNVVVGNVYDTKFTRNVFNFIKDKKDGRKYSLNKVFYENVSDSKTVAWEMDKTIHQVEKVMNNNNIMVTRRTSEQKGGLFDATVYKAKVAAKAKDGVYYPLKTSNSVVKDVAKYGGYTSIGIAYYSIFEYTIVNKKGEEKITRIIPIPIYISQNIKDSTALIEFGKSQIFCRAYEKIKDFKLLYRKLCIGSKININNYQYYIGGKSDERFYYDSAIQVTLDKKSEKYLKILSKYQNWKKENKDGELWENITKENNIELYNKLVEKMNSEIFTKKKSNKYNELNSEEIRNNFIKISVEEQAKVLLEILNLLTNKKSIFDLKSIDIKAARGKISFNLTSLIQFSIIEQSITGFYEKEITIIGDKGNDMENNNS

SEQ ID NO: 104 - protein, 702 aa, Helicobacter pullorum
MRKILKIDERIQFKEVDYTAKNPENKKFVEFKNLKKFCEILGAIVGDRALADSIARDMTLIKDEEELAQKLRGYGKFSQEQITQLSALHFSHHISLSLKALSEILPFMREGMRYDEACQEAKLQAKHNDKKSKFLPPFCESIYADELTNPVVHRAIAEYRKILNALIAKYGSVHKIHIELTRDVGKNFQEREKYKKEIESNYKARVQAMQECEKLGLTLSEGNILKLRLFREQNEICVYSGRKITLANLKEQGALEIDHILPYSRSSDDSYMNKVLVFTNENQNKGNKTPYEAFGGDSQKWGEIESLALRSGYPKKKAKRILDKGFGDREAGFKSRNIVDSGYIARLIANYTKEYLKFLPLDSHENTALIAGEKDSKIHVEAVKGMLTATMRHFWGLGSKNRYEHTHHAVDAIIIAYINAAMIQRFSQFRQNQESLKARFYAKELAKEEFKTQRAFFEPFSGFREQVLAKVGQIFVSRPPRKRARGALHEETFYSIDDKKLSETYGGKKGVQRALSLGKIRQIGTKIVANGPMVRVDIFKHTQSGRFYAVPIYTMDFALGILPNKAVVSGKDKDRIIKDWLEMDSCYEFCFSLFKDDVIEVQKRDMEKPELAYFVSLDASDGRIKVRHHCNDITKINENQKKLFSEAIEKEVVGRGSIQNLKVFKKYKVSPLGEIKEAKYEPRQPIALKTSPKKHRKQNNAQ

SEQ ID NO: 105 - protein, 1371 aa, Streptococcus dysgalactiae
MDKKYSIGLDIGTNSVGWAVITDDYKVPSKKFKVLGNTDRHSIKKNLIGALLFDSGETAEATRLKRTARRRYTRRKNRIRYLQEIFSSEMSKVDDSFFHRLEESFLVEEDKKHERHPIFGNIVDEVAYHEKYPTIYHLRKKLADSTDKADLRLIYLALAHMIKFRGHFLIEGDLNPDNSDMDKLFIQLVQTYNQLFEENPINASRVDAKAILSARLSKSRRLENLIAQLPGEKRNGLFGNLIALSLGLTPNFKSNFDLAEDAKLQLSKDTYDDDLDNLLAQIGDQYADLFLAAKNLSDAILLSDILRVNSEITKAPLSASMIKRYDEHHQDLTLLKALVRQQLPEKYKEIFFDQSKNGYAGYIDGGASQEEFYKFIKPILEKMDGTEELLAKLNREDLLRKQRTFDNGSIPHQIHLGELHAILRRQEDFYPFLKDNREKIEKILTFRIPYYVGPLARGNSRFAWMTRKSEETITPWNFEEVVDKGASAQSFIERMTNFDKNLPNEKVLPKHSLLYEYFTVYNELTKVKYVTEGMRKPEFLSGKQKEAIVDLLFKTNRKVTVKQLKEDYFKKIECFDSVEISGVEDRFNASLGTYHDLLKIIKDKDFLDNEENEDILEDIVLTLTLFEDKEMIEERLKKYANLFDDKVMKQLKRRHYTGWGRLSRKLINGIRDKQSGKTILDFLKSDGFANRNFMQLINDDSLTFKEAIQKAQVSGQGHSLHEQIANLAGSPAIKKGILQSVKVVDELVKVMGHKPENIVIEMARENQTTQKGQKNSRERMKRIEEGIKELGSQILKEHPVENTQLQNEKLYLYYLQNGRDMYVDQELDINRLSDYDVDHIVPQSFIKDDSIDNKILTRSDKNRGKSDNVPSEEVVKKMKNYWRQLLNAKLITQRKFDNLTKAERGGLSELDKAGFIKRQLVETRQITKHVAQILDSRMNTKYDENDKLIREVKVITLKSKLVSDFRKDFQFYKVREINNYHHAHDAYLNAVVGTALIKKYTKLESEFVYGDYKVYDVRKMIAKSEQEIGKATAKRFFYSNIMNFFKTEITLANGEIRKRPLIETNEETGEIVWDKGRDFATVRKVLSMPQVNIVKKTEVQTGALTNESIYARGSFDKLISRKHRFESSKYGGFGSPTVTYSVLVVAKSKVQDGKVKKIKTGKELIGMTLLDKLVFEKNPLKFIEDKGYGNVQIDKCIKLPKYSLFEFENGTRRMLASVMANNNSRGDLQKANEMFLPAKLVTLLYHAHKIESSKELEHEAYILDHYNDLYQLLSYIERFASLYVDVEKNISKVKELFSNIESYSISEICSSVINLLTLTASGAPADFKFLGTTIPRKRYGSPQSILSSTLIHQSITGLYETRIDLSQLGGD

SEQ ID NO: 106 - protein, 1007 aa, Helicobacter canadensis
MKVLGFDIGINSIGWAFVENNELKDCGVRLFTKAENPKTKESLALPRRNARSSRVRLRRRRSRLLSLKHIISKEFGLHYEDYIALDGNLPKAYTGKIESIYKLRYEALSQAISKEDLARVILHIAKHRGYMNKNQKTSQDSEKGAILSAIKENSNKIKHYQTAGEYFYKELFENLRDGTKEFKNIRNKAMKNEKTGNMESTYYNTILASDLEKELKLILEKQQAYHNYSDTFIKEVLEIAFYQRPLKDFSHLVGSCTFYENEKRACKNSYSAWEFIALGKIINTLESIKKDTGEIFSNEIITQILKEVLDKGSLSYTKLRKMINLDEKVKFKGLKYDKEGVEKTNLIEFKKLKEFKKALGEHNLERKTLDEIATHITLTKDENQLKKQLEQYALSQNQIDALAELDFNDHINLSFKALYEILPLMEKGKRYDEACNELGLKAKTSNQKSEFLPAFCDSIFAQELTNPIVNRAISEYRKVLNRLLKKYGKMHKIHIELARDAGLSKEARNKIEKEQKENKDINDKAEKTCKEFGLKPNAKNILKIKLWREQGEICAYSGKKITIDDLKEDKALEVDHIYPYSRSYDDSYNNKVLVFIKENQLKLNQTPYEAFGSNQEKWSKIQVLAQKLPYKKKNRILDENFKNKDQIEFISRNLNDTRYATSLIAKYTKEYLEFLPLSDDEDISLKSGEKGSKTHVQTMNGMLTSVLRHAWGFSQKDRNNHLHHALDAIIIAYSTNSIIKAFSDFKKNQEILKAKLYAKKLTSEEYKNQSKFTGFEKYRSKILEKLDSIFVSKPPNKNTKGALHEQTFYSYQDILEEYKTQEGLKRALECGKVRKIGTKYVVNDRMVRLDIFKKDNKFYGIPIYTMDFALGVLPNKVVTIGTDKDKIKKEWKTIDETYEFCFSLYKGDLVLIQKKEMQESEFAYYNGFDISSASISLEKHDNKFENLTENQKLLFPKAKEGDVEVRGIGIQGLKVFKKYMVTPLGEIQETRTEARQNIQPRKKHGLR

SEQ ID NO: 107 - protein, 1397 aa, Unknown
  Description of Unknown: gamma Proteobacterium sequence
MTKNYISPIAIDLGAKFTGVALYQYLEGADCTQEVAKGLLVDDRGNVTWSQEGRRGKRHQVRGYKRRKMAKRLLWLILDSEYGIKREEVTEPLLKFINGLLNRRGYTYISEEVDEESMNVSPLPFSEMMPDYFNSSAPLLEQLAKLLSDKNKLVRFRAEGKIPSNKNEFKKLLDTALDGKYKDEKKELSEAWGNILIASENVLKSTVDGHKSRSEYLANIKEDIKSNEELEKQISSKEIDGFYNLVGHLSNFQLRLLRKYFNDPNMSGVSYWDEKRLEKYFYQWVQGWHTKGGTDEAEKKNIILKTKGAPLLKTLKSLSADLTIPPYEDQNNRRPPKCQSVLLSDEKLTMHYPKWKEWVGQLVKQNDNAYLNENVTLANALHRIVERSRSIDPYQLRLLISITDAEKRNDLAGYKRLKLSLGSEVDEFLLLVKNIVDETKEAREGLWFETENKLFFKCGKTPPRKEKLKSTLLSAVLGKNLSDDEQSSFIEEFWKSGTPKIERRNVRGWCRLASQVQKTYGVYLKEYGLQQLHKLEAGKKLDDKPLALLYKNSGLIASKIGEALNIEPDEVSRFASPHSLAQIFNIIEGDVAGFNKTCRACTYENIWRMQEEKVESLLTNQLLSEIHGERKVPLKSAMCTRLSADSTRPFDGQMASIIEHIARKIAQHKIAQINDVPKEFSIDIPIIIESNQFSFTAELEEIKRGRGSAKAKKAKELGEKSKAGWVSKTERIKTSSEGICPYTGAPLGGSGEIDHIIPRSLTGRTKKTVFNSEANLIYCSSKGNHDKGNRVYVIEQLNDKYLKKQFSTSDVNLIKKKIKTTIQRFTEGGEKLRSFSELSREDQKAFRHALFVPELKSEVTSLLAVKNITRVNGTQAWLAKKIASLLAEHLDKQGRDYTLSAHQIDPWSVSKQRKMLASAEPIWAKKDPQPAASHVVDAVCTFLEALEQPHTASRLKTISSTSFEKTGWRSALIPDLIKVDALDRRPKYRRYNIGSTSLFKDGIYAERFLPILIDENGLMAGYDIDNSLKAKGADVVFESLSPFLLFKGEEVGAQSLSDWQERIDGRYLYMSIDKVKAFDYLQEKVGEKDIAAELLNSIHFTQRKTELRAKFSDDSGKKMKTLDAIRKSLKLTVTVNEIGKRKEKCGFSGTIGIPAKSAWENLLDEPLLETYWGTKMPPQEIWEKVYRKHFPRNIPNQAHRKVRKDFSLPVVDSVSGGFRVKRKTPNGYNYQLLAIDGYSAVGFKKEGDNVDFKSPALVPQIAESKSVTPISSELVHLDKNEIVYFDEWRKIDISDSDLKQFVSSLELAPGSQNRFYIRFTVDEDQFERHFKSALRVNGIQDLDTVNKTFDWNREIPSLLIPPRSNLFLLETGQKITFEYIANGANAEVKKAYSLRRA

SEQ ID NO: 108 - protein, 1082 aa, Neisseria meningitidis
MAAFKPNPINYILGLDIGIASVGWAMVEIDEEENPIRLIDLGVRVFERAEVPKTGDSLAMVRRLARSVRRLTRRRAHRLLRARRLLKREGVLQAADFDENGLIKSLPNTPWQLRAAALDRKLTPLEWSAVLLHLIKHRGYLSQRKNEGETADKELGALLKGVADNAHALQTGDFRTPAELALNKFEKESGHIRNQRGDYSHTFSRKDLQAELILLFEKQKEFGNPHISGGLKEGIETLLMTQRPALSGDAVQKMLGHCTFEPAEPKAAKNTYTAERFIWLTKLNNLRILEQGSERPLTDTERATLMDEPYRKSKLTYAQARKLLGLEDTAFFKGLRYGKDNAEASTLMEMKAYHAISRALEKEGLKDKKSPLNLSPELQDEIGTAFSLFKTDEDITGRLKDRIQPEILEALLKHISFDKFVQISLKALRRIVPLMEQGKRYDEACAEIYGDHYGKKNTEEKIYLPPIPADEIRNPVVLRALSQARKVINGVVRRYGSPARIHIETAREVGKSFKDRKEIEKRQEENRKDREKAAAKFREYFPNFVGEPKSKDILKLRLYEQQHGKCLYSGKEINLGRLNEKGYVEIDHALPFSRTWDDSFNNKVLVLGSENQNKGNQTPYEYFNGKDNSREWQEFKARVETSRFPRSKKQRILLQKFDEDGFKERNLNDTRYVNRFLCQFVADRMRLTGKGKKRVFASNGQITNLLRGFWGLRKVRAENDRHHALDAVVVACSTVAMQQKITRFVRYKEMNAFDGKTIDKETGEVLHQKTHFPQPWEFFAQEVMIRVFGKPDGKPEFEEADTPEKLRTLLAEKLSSRPEAVHEYVTPLFVSRAPNRKMSGQGHMETVKSAKRLDEGVSVLRVPLTQLKLKDLEKMVNREREPKLYEALKARLEAHKDDPAKAFAEPFYKYDKAGNRTQQVKAVRVEQVQKTGVWVRNHNGIADNATMVRVDVFEKGDKYYLVPIYSWQVAKGILPDRAVVQGKDEEDWQLIDDSFNFKFSLHPNDLVEVITKKARMFGYFASCHRGTGNINIRIHDLDHKIGKNGILEGIGVKTALSFQKYQIDELGKEIRPCRLKKRPPVR

SEQ ID NO: 109 - protein, 1334 aa, Listeria monocytogenes
MKKPYTIGLDIGTNSVGWAVLTDQYDLVKRKMKISGDSEKKQIKKNFWGVRLFEKGETAAKRRMSRTARRRIERRRNRISYLQEIFAIQMNEVDDNFFNRLKESFYAESDKKYNRHPFFGTVEEEVAYYKDFPTIYHLRKELIDSQKKADLRLVYLALAHIIKYRGHFLIEGALDTKNTSIDEMFKQFLQIYNQVFANDIEEASLKKTEKNQEVAQILAEKFTRKDKLDKILSLYPGEKTTGVFAQFVNIIVGSTGKFKKHFNLHEKKDINCAEDTYDTDLESLLAIIGDEFAEVFVAAKNAYNAVVLSNIITVTDSTTRAKLSASLIERFENHKEDLKKMKRFVRTYLPEKYDEIFDDTEKHGYAGYISGKTKQADFYKYMKATLEKIEGADYFIAKIEEENFLRKQRTFDNGVIPHQLHLEELEAILHQQAKYYPFLREDYEKIKSLVTFRIPYFVGPLAKGQSEFAWLTRKADGEIRPWNIEEKVDFGKSAVDFIEKMTNKDTYLPKENVLPKHSLCYQKYMVYNELTKVRYIDDQGKTNYFSGQEKQQIFNDLFKQKRKVKKKDLELFLRNINQIESPTIEGLEDSFNASYATYHDLLKVGMKQEILDNPLNTEMLEDIVKILTVFEDKRMIKEQLQQFSDVLDGTVLKKLERRHYTGWGRLSAKLLVGIRDKQSHLTILDYLMNDDGLNRNLMQLINDSNLSFKSIIEKEQVSTTDKDLQSIVAELAGSPAIKKGILQSLKIVDELVSVMGYPPQTIVVEMARENQTTNKGKNNSKPRYKSLEKAIKEFGSQILKEHPTDNQELKNNRLYLYYLQNGKDMYTGQELDIHNLSNYDIDHIVPQSFITDNSVDNLVLTSSAGNREKGDNVPPLEIVQKRKIFWEKLYQGNLMSKRKFDYLTKAERGGLTEADKARFIHRQLVETRQITKNVANILHQRFNYKTDGNKDTMETVRIVTLKSALVSQFRKQFQFYKVREVNDYHHAHDAYLNGVVANTLLKVYPQLEPEFVYGEYHQFGWFKANKATAKKQFYTNIMLFFAQKDRIIDENGEILWDKRYLETVKKVLGYRQMNIVKKTEIQKGEFSNVTPNPKGKSNKLIPRKKDWDPIKYGGFDGSKMAYAIIIEYEKQKRKVRIEKKLIQINIMEREAFEKDEKTFLEEKGYHQPKVLIKVPKYTLYECKNGRRRMLGSANEAHKGNQMLLPNHLMALLYHAEKYEAIDGESLAYIEVHRALFDELLAYISEFARKYTLSNDRLDEINMLYERNKDGDVKSIAESFVSLKKFNAFGVHQDFSFFGTKIERKRDRKLNELLNSTIIYQSITGLYESRKRLDN

SEQ ID NO: 110 - protein, 1337 aa, Enterococcus faecalis
MKKDYVIGLDIGTNSVGWAVMTEDYQLVKKKMPIYGNTEKKKIKKNFWGVRLFEEGHTAEDRRLKRTARRRISRRRNRLRYLQAFFEEAMTALDENFFARLQESFLVPEDKKWHRHPIFAKLEDEVAYHETYPTIYHLRKKLADSSEQADLRLIYLALAHIVKYRGHFLIEGKLSTENISVKEQFQQFMIIYNQTFVNGESRLVSAPLPESVLIEEELTEKASRTKKSEKVLQQFPQEKANGLFGQFLKLMVGNKADFKKVFGLEEEAKITYASESYEEDLEGILAKVGDEYSDVFLAAKNVYDAVELSTILADSDKKSHAKLSSSMIVRFTEHQEDLKKFKRFIRENCPDEYDNLFKNEQKDGYAGYIAHAGKVSQLKFYQYVKKIIQDIAGAEYFLEKIAQENFLRKQRTFDNGVIPHQIHLAELQAIIHRQAAYYPFLKENQEKIEQLVTFRIPYYIGPLSKGDASTFAWLKRQSEEPIRPWNLQETVDLDQSATAFIERMTNFDTYLSSEKVLPKHSLLYEKFMVFNELTKISYTDDRGIKANFSGKEKEKIFDYLFKTRRKVKKKDIIQFYRNEYNTEIVTLSGLEEDQFNASFSTYQDLLKCGLTRAELDHPDNAEKLEDIIKILTIFEDRQRIRTQLSTFKGQFSAEVLKKLERKHYTGWGRLSKKLINGIYDKESGKTILGYLIKDDGVSKHYNRNFMQLINDSQLSFKNAIQKAQSSEHEETLSETVNELAGSPAIKKGIYQSLKIVDELVAIMGYAPKRIVVEMARENQTTSTGKRRSIQRLKIVEKAMAEIGSNLLKEQPTTNEQLRDTRLFLYYMQNGKDMYTGDELSLHRLSHYDIDHIIPQSFMKDDSLDNLVLVGSTENRGKSDDVPSKEVVKDMKAYWEKLYAAGLISQRKFQRLTKGEQGGLTLEDKAHFIQRQLVETRQITKNVAGILDQRYNANSKEKKVQIITLKASLTSQFRSIFGLYKVREVNDYHHGQDAYLNCVVATTLLKVYPNLAPEFVYGEYPKFQAFKENKATAKAIIYTNLLRFFTEDEPRFTKDGEILWSNSYLKTIKKELNYHQMNIVKKVEVQKGGFSKESIKPKGPSNKLIPVKNGLDPQKYGGFDSPVVAYTVLFTHEKGKKPLIKQEILGITIMEKTRFEQNPILFLEEKGFLRPRVLMKLPKYTLYEFPEGRRRLLASAKEAQKGNQMVLPEHLLTLLYHAKQCLLPNQSESLAYVEQHQPEFQEILERVVDFAEVHTLAKSKVQQIVKLFEANQTADVKEIAASFIQLMQFNAMGAPSTFKFFQKDIERARYTSIKEIFDATIIYQSTTGLYETRRKVVD

SEQ ID NO: 111 - protein, 1426 aa, Capnocytophaga ochracea
MKNILGLDLGTTSIGFAHIVEDENKEKSEIKELGVRIVSLTTDEQSDFEKGKSITTNANRTLKHGARLNLDRYQQRRKYLIDLLQKANLITPSSILAENGKNTTHSTWQLRAKAVTERIEKEEFARILLAINKKRGYKSSRKAKTEDEGQAIDGMAIAKRLYDENLTPGQLSLQLLQQNKKLLPDFYRSDLQKEFDLVWNFQKQFYPDILTDIFYKELQGKGKDATSKAFSKRYHFDTTENKGSKESVRLQAYQWRAEAISKQLSKEEVAYVLTEINNNLNNASGYLGAISDRSKELYFNRQTVGQYLYAKLQENRHNSLKNKVFYRQDYLDEFERIWETQASFHKELTDELKKQIRDVVIFYQRKPKSQKGLISFCEFESKEIEIEKDGKTITKNIGARVVPKSSPLFQEFKIWQILNNVICKRKGIRKKKISAKTTQLDLLNESSQTIFSLDMECKQLLFDELNLKGDLKSDKVLKLLGYSPQEWEINYNQLEGNRTQKALYEAYLKIVEMEAHDVKDILQIKSAKDDWSLDESPLSASEIREKVKAIFQTLGICTKILYFDPLLPVKEFEEQDSYQLWHLLYSYESDDSTSGNETLYRILEKKYAFKREHARILANVALQDDYGSLSTKAIRKIYPNIKENQYSTACEKAGYKHSKLSLTTEELEARELKNIIPLLKKNALRNPVVEKILNQMINVVNALIEKNSERDAEGKITKYFHFDEIRIELARELKKNAQKRYEMTQNINKAKLEHQKISEILQKEFGIKNPTKSDIIRYRLYQELEHNGYKELYTNAPIARDMLFSKNIEIEHIVPKARVFDDSFSNKTLTFHRINSDKGEYTAFDYITSLNSEEELNQYLTRVENAYKTKSISPTKYKNLLKKASEIGDDFINRDLRDTQYIAKKAKEILFQVTKNVLSTSGSITDRLREDWGLVDVMKELNMPKYQSLGLTEVEERKDGNKVTVIKNWTKRNDHRHHAMDALTVAFTKPSYIQYLNHLNARKDENNKNYSVILAIEEKETIKVPTNNGKNKRVFIEPIPNFRQVAKKHLEEIFISHKAKNKVVTKNTNKPAGTDKQQITLTPRGQLHKETIYGKYQYYINKEEKIGVKFDERTIAKVSNPVYREALLKRLQANDNDPKKAFAGKNALSKNPIYLDESKTKTLPEKVNLTYLEEDFSIRKDISPDNFKDLKSIEKVIDQGVKRILIKRLQAYDNDPKKAFVDLEKNPIWLNKEKGIAIKRVTISGVNNAQPLHIGKDHLGKTTLNKEGKEIPVDYVSTGNNHHVAIYRDKEGNLQEQIVSFFDAVVRAQQGIPIIDKTYKQAEGWQFLFTMKQNEMFVFPNATTGFNPAEIDLLDPKNKKLISPNLFRVQKIATKDYFFRHHLETNVETDNILKNVTWKREGLSGLKDIVKVRINHLGDIVSIGEY

SEQ ID NO: 112 - protein, 1424 aa, ParaBacteroides sp.
MKRILGLDLGTNSIGWALVNEAETDEEVSSIIRLGVRVNPLTVDETQNFEKGKSITTNAERTLKRSMRRNLQRYKLRRDALVEFLKELGFITDETILSEQGNRTTFETCRLRAKAAEEEISLEELSRVLLMINKKRGYKSSRKVKKEEDGVLIDGMEIAKKLYEEDLTPGQLCSQLLESGKKVLPDFYRSDLQEELDRIWSVQKQFHPDVFCDAAKEEIKGKNRSQTWAILANYFVWKEEVVGWNDREAKNETIEKECKLVGLKRTTKGYELKKENYRWRAQALTEQLGLEEIAVVLQEINGQINASSGYLGAISDRSKVLYFNHQTVGQYQMAELDKNPHASLRNMVFYRQDYLDEFDRIWEKQAEFHKELTAELKKEIRDMIIFYQRRLKSQKGLISFCEFERLEIVVEKDGKKQTKVIGCKVIPRSHPLFQEFKVWQTLNDIKVLGREKKRNALSASESRALYPEEKEILARELAIKENMKKADVLKLLFENPQELDLNFKQIDGNRTGFSLFSAYSKMIEKYGYEPLDFKKPADEIIGQLRTIFTDLGWNTNLFTIDLTKEGKELEMQPYFRLWHLLYSFEGDNTSTGNGKLIEKIMQLCGVEKEYAVELASLSFQDDYGSLSAKAIKRILPYLKEGNLYDVACEYAGYRHSKSSLTKEEIENKVLKGKLEVLPKNSLRNPVVEKILSQMVNVINTIIDTYGKPDEIRVELARELKKSAKEREELTKAIAKSTREHEEIRKLLQDEFGMMNVSRNDIIRYKLYEELKDNGYKTLYSNQYIPKEKIFSKEIDIEHIIPQSRLFDDSLSNKTLEYKAINIEKGNKTAYDFVKEKYGEEGLQQYINRCESLFNDKKAKLRKLKMEQKDIPDGFIDRDLRNTQYIAKKALAMLNEICRRVVATTGSITDQLREDWQLVDVMKELNLPKYEALGFVETYEDKDGRKIKRIKDWTKRNDHRHHAMDALTVAFTKDAFIQYFNNKNAAQDSGNRNHTNIIGIKTRYFDKGRALPPIPLEQFRIEAKQHLEKLLVSIKAKNKVVTVNVNRTKKRKGENTKIQQTPRGQLHLETVYGSHKQYVTKIEKVNASFDAAKIATVSKRAYRNALLKRLETFGNDPKKAFTGKNALEKNPLYADKYQTIRVPEKVQTVEFETIYTIRKPVDPALNVDKVVDVKVRAILERRLKEYGGDPKKAFVNFWENPIWLNKEKGISIKRVSIRGINNAQSIHVKKDKNGNPIWDENGKQIPVDFVNTGNNHHVAIYRKPVLDKKGQVTFDEDGNLMYELDEVVVPFFEAVTRANLGLPIIDKDYRKSEGWQFLFSMKQNEYFVFPNEKTGFNPKEVDLLNPDNYAMISPNLFRVQTMSKVMYGNNVVRDYKFRHHLETTVKDMKELKDIAYKQYKTLSFGNSVVKIRINHIGQIVSVGEY

SEQ ID NO: 113 - protein, 1395 aa, Lactobacillus jensenii
MKEIKDYIIGLDIGTNSCGYVVTDKQNNILKLKGKTAIGARLFKEGQAAADRRSFRTTRRRLARRHWRLGLLEEIFDPEMEKIDPNFFRRLKESDYSPKDSRKQFNAIVFKSIKADKRFYKKYPTIYHLRNALMHDNQKHDLREIFMAVHHIVKYRGNFLREDSVNAFKAAKFSLRGEDGIGPVDKLNDLLKEIYSEYSPELATNNLSKIEDIIKDKNLYKQDKLKQVATLLIKEADSKDKAKLNKDIAKQVANSFMGYMFRLDTLFSLTDVDVKDYKLKFSDANIDESLDDLTSLLTDAQIEFVLELQSIYNTIVLNEIVPDGMSLSESMIKKYDDHKEDLKIFKEYIDSLSDQKKAKKLLSAYNLYVNYRKSDLVEAKNLFKNKKVGDKNFADVISNFEVFGKFVSDNLDDSELANKIKARLDLGEFLPKQRTNQNGVIPYQLHQVELTQILEKQGKYYPFLITPNPVESHRNNAPYEISELVSFRVPYYVGPLIDNQSIKDKQNKNKFAWMVRQKQGQITPWNLEEMVDTTESANQFIKRMTRKDTYLLAEDVLPKSSLVYQKFMILDELNRIKIDGKKLTSELKHDIFEKLFKKQKSINLDNLKNYLLVEGNIPGLIEGLSDGINFNNSFSTYIDYRNIFGDEIDNPNKQADFEKMIEWSTVFEDRKIFKRKLKEITWLTSEQIKQVSSKRYSGWGRLSKKLLTQITDENGVNILQRLWNEPETLTEVLANPVIKRKIVEANSSFTKAKDMKDILVEAYTSPQNKKAIRQVMRVVDDIIAAAHGKKPSQIAIEFAREDQDNPQMTKSRKAQLDQIYAKISDEFLDDAVKNELKNMKDNKPLAKDKVFLYFKQMGRDAYSGEKLSLDNLQDYDIDHIYPQSFIKDDSFDNRVLVQRAYNNGKSDNVPVLLFGNKIAAGLGITIRQMWKKWLELGLISKRKFNNLITDPEKISRNMASGFVNRQLVETSQVIKLVANILQAKLPDTEIIEVKASYNSILRKEFNLYKSREVNDYHHAIDAYLTTIVGNYLYQVYPKLRPYFVYGQFKKFGKAENQEDDPVKKIKKFNFIYQLIWGKDDAICISHTNQQVFSKKDIIDKLTTAYNFKYMNISHAVYTRNNNMFKQTLFPIIERTTAKTKSLIPKKLDRPTDIYGGYSNNNDAYLALVKVDKKRGSEYRVVGIPMRAAAMLKASKNYDEDLRKVIEPMVMFDKNGKAKRGIEGFRVLVGKMPFKQAVLDGNKKFMLTGTVDTPNLKQLVLSQQNMKYILDYIEDVDCRKHKFGDKVQNPDKCLLEVFDEIIEIVDKYFELFDSRDFREKLRNSRNKFIKLEASKKADTILAILKGLQAKSTRATIKELNISDFGRIITSSISPEAQLIYQSPTGLFERRVKVKDL

SEQ ID NO: 114 - protein, 1140 aa, Roseburia intestinalis
MRENGSDERRRNMDEKMDYRIGLDIGIASVGWAVLQNNSDDEPVRIVDLGVRIFDTAEIPKTGESLAGPRRAARTTRRRLRRRKHRLDRIKWLFENQGLINIDDFLKRYNMAGLPDVYQLRYEALDRKLTDEELAQVLLHIAKHRGFRSTRKAETAAKENGAVLKATDENQKRMQEKGYRTVGEMIYLDEAFRTGCSWSEKGYILTPRNKAENYQHTMLRAMLVEEVKEIFSSQRRLGNEKATEELEEKYLEIMTSQRSFDLGPGMQPDGKPSPYAMEGFSDRVGKCTFLGDQGELRGAKGTYTAEYFVALQKINHTKLVNQDGETRNFTEEERRALTLLLFTQKEVKYAAVRKKLGLPEDILFYNLNYKKAATKEEQQKENQNTEKAKFIGMPYYHDYKKCLEERVKYLTENEVRDLFDEIGMILTCYKNDDSRTERLAKLGLVPIEMEGLLAYTPTKFQHLSMKAMRNIIPFLEKGMTYDKACEEAGYDFKADSKGTKQKLLTGENVNQTINEITNPVVKRSVSQTVKVINAIIRTYGSPQAINIELAREMSKTFEERRKIKGDMEKRQKNNEDVKKQIQELGKLSPTGQDILKYRLWQEQQGICMYSGKTIPLEELFKPGYDIDHILPYSITFDDSFRNKVLVTSQENRQKGNRTPYEYMGNDEQRWNEFETRVKTTIRDYKKQQKLLKKHFSEEERSEFKERNLTDTKYITTVIYNMIRQNLEMAPLNRPEKKKQVRAVNGAITAYLRKRWGLPQKNRETDTHHAMDAVVIACCTDGMIQKISRYTKVRERCYSKGTEFVDAETGEIFRPEDYSRAEWDEIFGVHIPKPWETFRAELDVRMGDDPKGFLDTHSDVALELDYPEYIYENLRPIFVSRMPNHKVTGAAHADTIRSPRHFKDEGIVLTKTALTDLKLDKDGEIDGYYNPQSDLLLYEALKKQLLLYGNDAKKAFAQDFHKPKADGTEGPVVRKVKIQKKQTMGVFVDSGNGIAENGGMVRIDVFRVNGKYYFVPVYTADVVKKVLPNRASTAHKPYGEWKVMEDKDFLFSLYSRDLIHIKSKKDIPIKMVNGGMEGIKETYAYYIGADISAANIQGIAHDSRYKFRGLGIQSLDVLEKCQIDVLGHVSVVRSEKRMGFS

SEQ ID NO: 115 - protein, 992 aa, Treponema vincentii
MQKNSGEDENCGFEFLTEEEKELIKPLFFRISKPSFQFADIEKKLKGKNGFWKFNYRKDTNVSGCPVSAGLKNIFGDEASAESWKDKKVGQYDMCDIWHVLFDFDDEEKLLEFAKRKLFLSDEAAKKFCAIRIQQGYANLSLKAIRKITPFLRKGYIYSTAVFLANIPFMIGRDIFLQNEKEIEDSVKNIIGTLRDKNNIIVLANRCIESAFKDKDNDFRFEEWDKALVENSAWDLFGKKKWNEYDEEKRKTIISQVSEKVEDNLKIAVGKNPNDYKYPLLRTDDLIMDYLNQKGFVVKGELYHPSDTDYNFETPVPAEDGKIYLASPRSPSVKNPVVMRALHQLRKLVNYLIKTGKIDSTTKINVELANDVNDKNQRKAIEELAKTNEKNNADARKKIEELCNEAGFKVVPTESDIKKFRLWKEQNETCPYTGKHISFTDLFGPIPKFDFEHTIPRSLSYDDSLENLTLCDSEFNRNIKKQRLPSELPDFEEINKRFLKFYEDKIDNCLRIIELNSKSGGSYEEPAVKDLRIVKKHKAQYELNYYKEKLRRFSSTEITSGFKHSQLNDTRIITKFSLSYLKGVFDHVQPVKGSMTDTFKRQWGLMERNEIKDRSNHTHHTVDALTVACINRGKFNLLSEAIKNSSDGKHLKFPKPWETFDTDVLNAVRYIIPKYFSDESSLRQSKKILRGRDGKPVLKNGKAVFIQGATARGSLHKDTFYGCIKTVPEKGGKSEMIFVQRIPVSTLDEKVAEKIIDKRIRKTFEKNLSTGIQTLQEIQTDGILLPFKKEGRDVFVKRVRIKAHPTSPIILKKHHNVINKNPKDYKQNYYVENEENYLLAIYRGKDAKGKDVSDHKLCNLLNAVKSRQNKTGFYPDFKEKKGINLQLYKVLKIGKIVILQNDIQEDVFALPKEKLWKRMYRIAGLATSRNDIQIKLVHIIRETPWGYMKGEKDLNAGKECLLYGTANFKGLVEGQDFTVSPAGEIIQKARVC

SEQ ID NO: 116 - protein, 1340 aa, Enterococcus faecium
MKKEYTIGLDIGTNSVGWSVLTDDYRLVSKKMKVAGNTEKSSTKKNFWGVRLFDEGQTAEARRSKRTARRRLARRRQRILELQKIFAPEILKIDEHFFARLNESFLVPDEKKQSRHPVFATIKQEKSYHQTYPTIYHLRQALADSSEKADIRLVYLAMAHLLKYRGHFLIEGELNTENSSVTETFRQFLSTYNQQFSEAGDKQTEKLDEAVDCSFVFTEKMSKTKKAETLLKYFPHEKSNGYLSQFIKLMVGNQGNFKNVFGLEEEAKLQFSKETYEEDLEELLEKIGDDYIDLFVQAKNVYDAVLLSEILSDSTKNTRAKLSAGMIRRYDAHKEDLVLLKRFVKENLPKKYRAFFGDNSVNGYAGYIEGHATQEAFYKFVKKELTGIRGSEVFLTKIEQENFLRKQRTFDNGVIPHQIHLSELRAIIANQKKHYPFLKEEQEKLESLLTFKIPYYVGPLAKKQENSPFAWLIRKSEEKIKPWNLPEIVDMEGSAVRFIERMINTDMYMPHNKVLPKNSLLYQKFSIYNELTKVRYQDERGQMNYFSSIEKKEIFHELFEKNRKVTKKDLQEFLYLKYDIKHAELSGIEKAFNASYTTYHDFLTMSENKREMKQWLEDPELASMFEEIIKTLTVFEDREMIKTRLSHHEATLGKHIIKKLTKKHYTGWGRLSKELIQGIRDKQSNKTILDYLINDDDFPHHRNRNFMQLINDDSLSFKKEIKKAQMITDTENLEEIVKELTGSPAIKKGILQSLKIVDEIVGIMGYEPANIVVEMARENQTTGRGLKSSRPRLKALEESLKDFGSQLLKEYPTDNSSLQKDRLYLYYLQNGRDMYTGAPLDIHRLSDYDIDHIIPRSFTTDNSIDNKVLVSSKENRLKKDDVPSEKVVKKMRSFWYDLYSSKLISKRKLDNLTKIKLTEEDKAGFIKRQLVETRQITKHVAGILHHRFNKAEDTNDPIRKVRIITLKSALVSQFRNRFGIYKVREINEYHHAHDAYLNGVVALALLKKYPQLAPEFVYGEYLKFNAHKANKATVKKEFYSNIMKFFESDTPVCDENGEIFWDKSKSIAQVKKVINHHHMNIVKKTEIQKGGFSKETVEPKKDSSKLLPRKNNWDPAKYGGLGSPNVAYTVAFTYEKGKARKRTNALEGITIMEREAFEQSPVLFLKNKGYEQAEIEMKLPKYALFELENGRKRMVASNKEAQKANSFLLPEHLVTLLYHAKQYDEISHKESFDYVNEHHKEFSEVFARVLEFAGKYTLAEKNIEKLEKIYKENQTDDLAKLASSFVNLMQFNAMGAPADFKFFDVTIPRKRYTSLTEIWQSTIIHQSITGLYETRIRMGK

SEQ ID NO: 117 - protein, 1363 aa, Lactobacillus rhamnosus
MTKLNQPYGIGLDIGSNSIGFAVVDANSHLLRLKGETAIGARLFREGQSAADRRGSRTTRRRLSRTRWRLSFLRDFFAPHITKIDPDFFLRQKYSEISPKDKDRFKYEKRLFNDRTDAEFYEDYPSMYHLRLHLMTHTHKADPREIFLAIHHILKSRGHFLTPGAAKDFNTDKVDLEDIFPALTEAYAQVYPDLELTFDLAKADDFKAKLLDEQATPSDTQKALVNLLLSSDGEKEIVKKRKQVLTEFAKAITGLKTKFNLALGTEVDEADASNWQFSMGQLDDKWSNIETSMTDQGTEIFEQIQELYRARLLNGIVPAGMSLSQAKVADYGQHKEDLELFKTYLKKLNDHELAKTIRGLYDRYINGDDAKPFLREDFVKALTKEVTAHPNEVSEQLLNRMGQANFMLKQRTKANGAIPIQLQQRELDQIIANQSKYYDWLAAPNPVEAHRWKMPYQLDELLNFHIPYYVGPLITPKQQAESGENVFAWMVRKDPSGNITPYNFDEKVDREASANTFIQRMKTTDTYLIGEDVLPKQSLLYQKYEVLNELNNVRINNECLGTDQKQRLIREVFERHSSVTIKQVADNLVAHGDFARRPEIRGLADEKRFLSSLSTYHQLKEILHEAIDDPTKLLDIENIITWSTVFEDHTIFETKLAEIEWLDPKKINELSGIRYRGWGQFSRKLLDGLKLGNGHTVIQELMLSNHNLMQILADETLKETMTELNQDKLKTDDIEDVINDAYTSPSNKKALRQVLRVVEDIKHAANGQDPSWLFIETADGTGTAGKRTQSRQKQIQTVYANAAQELIDSAVRGELEDKIADKASFTDRLVLYFMQGGRDIYTGAPLNIDQLSHYDIDHILPQSLIKDDSLDNRVLVNATINREKNNVFASTLFAGKMKATWRKWHEAGLISGRKLRNLMLRPDEIDKFAKGFVARQLVETRQIIKLTEQIAAAQYPNTKIIAVKAGLSHQLREELDFPKNRDVNHYHHAFDAFLAARIGTYLLKRYPKLAPFFTYGEFAKVDVKKFREFNFIGALTHAKKNIIAKDTGEIVWDKERDIRELDRIYNFKRMLITHEVYFETADLFKQTIYAAKDSKERGGSKQLIPKKQGYPTQVYGGYTQESGSYNALVRVAEADTTAYQVIKISAQNASKIASANLKSREKGKQLLNEIVVKQLAKRRKNWKPSANSFKIVIPRFGMGTLFQNAKYGLFMVNSDTYYRNYQELWLSRENQKLLKKLFSIKYEKTQMNHDALQVYKAIIDQVEKFFKLYDINQFRAKLSDAIERFEKLPINTDGNKIGKTETLRQILIGLQANGTRSNVKNLGIKTDLGLLQVGSGIKLDKDTQIVYQSPSGLFKRRIPLADL

SEQ ID NO: 118 - protein, 1234 aa, Prevotella tannerae
MPNFWSIFTENLQTYLMKTRILGLDTGTNSLGWAVVDRDENNQYTPICRGDLIFTEGVKQEKGIEFSLAAERTSYRASRRHYFRRRLRKVEVLKVLVKHKLCPPLSDEALNRWHTKKEYPLDEDFILWQRTNEADNKNPYHDRHICLHRKLNLKDSQTDRYTLGRALYHLTQRRGFLSNRLDQNEEAEETGKVKSAISELSKEMKEAGCEFLGDYFYLLYRTEGNRVRIRSRYTDREKHYLQEFKEICRVQELDEDLAKALEKTIFFQRPLKSQRQGVGKCTMEKGHSRCAVSHPLYEEYRLLCYLNNIRIKTPSDDRLRPLNAEEREKITPLFYKEKNFDFEKIAKKLAGKTPFGWIRDAEDWPYQFNYRMTQEAPACPTTAQLIKVFGEDWKAALAETYTMSAKQDGTLKTEDEICTDIWNVLYSFSSKEKLKEFGLKKLQLDEVQAKAFSEIRLTRDFASLSLKAIRKILFFLRTGEDYSKAIFLANIPTIVGEEIWNDIERRSRLLYKVDLALRPQEERDAEEHRTIAERIKAAVAAEVPDAPIDLLYHPSMIEAYPDAKRNERFDCYQLGSPKTNAVRNPMAMRSLHMVRKVINHLLRKHIIDEKTEIHIEYARELNDANKRQAIADWQRELSKRHTAYAQNIRQLYKAETGLVIEPTKADILKYQLWEEQQHVCLYTGKKIGIADFLGANPKFDIEHTIPRSRGGDSTQENLTLCESKFNRDIKRDKLPTELANYEEILARIEHWKKQCYALKLKRDGIRTHSGLEKSIKDSRIRRRHLVGLEYGYLKGKYDRFTMKEVPEGFSRRQGAGIGLISKYAGLFLKSLFKDPKNPNRSNVYVVKGAITAEFRKLWGLQQADEAKSRENHTHHCIDAYTIACIGPCEYAALAAYYRSDEEFKYGRRREKPQFEKPWPTFTEDLLKLQEELLIVHQTTDKLGKRDRRKVKTPRGKFLTGGDSARGRLHQETYYGAINYDGNIKYVVRKPLDSLTEKDLDKIVDETVMGIVKGAVEAKGSLKEALADGIYMNKEKGILIKRVRIFSDVSEPINLKQLRDVSTKEYKRHIHLRKDENYLFAIYEGIDKKKNKKQTETATVDYLDAAKFYKDSKRRDKANSLVGDYSKKNKLPLKCILKKRQMVLFYEHSPEEIRFKDKKDLSRRLYIVTSIAKDGRVKFLHHQAATATGIQSSPSPFTNDGEHQPYYRLSASNIKVLVAGIDFDINILGEITPKL

SEQ ID NO: 119 - protein, 1496 aa, Prevotella veroralis
MKTILGLDLGTNSIGWAKVCVDDNGNYLRDIKLGSRIIPMSQDVLGNFDKGVTESQTSVRTGFRGVRRIRERSLLRRERLHRVLHVLGYLPPHYDSAIGWNKNEPSTYGKFLNHGEPKLAWEHKEDGSMRFLFMESFHEMMADFAKSQPSLVSDGKKIPLDWTIYYLRKKALSQPIRKEELAWLLLNFNQKRGYYQLRGEEDDDNPTKCEEYYELKVVGIEADEEGKNGNTWYNVKLENGWIYRRQSKIPLDDWIGKVREFIVTTEYEKDGITLKKDKNGDVKRSFRSPSEDDWGLRKKRTEKLLDSSKMTVGAFVYDHLLAEPSDKIRGKFIRTIERKYYKKELYAILCEQSKYHEELRSGDYLNKCAEELYKNNQPHRNSLLTKDLAYLLLEDLIFYQRPLKTKKSLIAECPYEAYKYVDKETGEIKRQGIKCIAKSNPYYQEFRLWQFISNLRLFNKADDKEVTADYLPTQDDYVRLFAYLNDRKEINQETLLKEFFKLKKITVNSEKVFPIRWNYIEDKEKKYPCNETRHELLLALDRARIDHSWLEKPGQEYRLWHLLYSVESKEETKEALRKLKDDDAFVESFLKVKPFKREYGAYSEKAIKKLLAVMRMGSLWRETDICDTTKGNITKILQGEIDEKLKEKISASVSSYNQLSDFQGLPVWLACYVVYGRHSEAAEIQHWKTPESLLAYINGFKQHSLRNPIVEQCILETLRTVHDIWKEVGHIDEIHVELGRNMKSTADQRARISENVLRNENTNLRIKSLLLELKNDPNIKDVRPYSPMQQEKLRIYEEGVLQELTKDDKDFTEITKISTMAQPSAKELQRYKLWLEQKYRSPYTGKSISLTKLFTSAYQIEHVIPQSRYFDDSFSNKVICESEVNSLKDNMLGYEFIKNHGGEIIHCTMLGDVKVLSESEYKAFVNDHYAHNKRKRENLLLEDIPQEFLNRQMNDSRYISKVVKALLSNIVRAEGEEEATSKFVVSCSGGITDRLKKDWGLNDVWNKIVYPRFERLNRLTGTEAFGQWENKDGKRVFQTAVPLELQRGFNKKRIDHRHHAMDALVIACTSRNIINYLNNESANNPKKREDLRQKLCDKNRTIRKPWETFTQDATAALEDVIVSFKNYVRIINKATNYYERYDVEGKKVIAEQRGDDMWAIRKPMHEATYYGRVNLRRKKKVNLRVALENISSICDNKLRIYINGLVEKGFNTKQILDKFKNTNDHFSMQKIDKVEIWQFTNEEEKLVATRKPLDTSFDTKKIASITDTGIQTILLNYLETKGGDSTIAFTPEGIVEMNQNISKYNNGKEHMPILKVRLYTKLGKKIPVGQTGCKAKQFVIAEAGTNLYFAIYEDEEGKRSYRTIPLNEVVERLKQGLSPVPEKNDKDVHLKFYLSPNDLVYVPIEDEHESLAKDHIYKFVDSSGTTANFIPHRSANVIFELNKKDAEKFCSGSIIQNEYGVGSSQSKNQKAITGEMIKAVCRKLEVDRLGNVIKVI

SEQ ID NO: 120 - protein, 1082 aa, Neisseria cinerea
MAAFKPNPMNYILGLDIGIASVGWAIVEIDEEENPIRLIDLGVRVFERAEVPKTGDSLAAARRLARSVRRLTRRRAHRLLRARRLLKREGVLQAADFDENGLIKSLPNTPWQLRAAALDRKLTPLEWSAVLLHLIKHRGYLSQRKNEGETADKELGALLKGVADNTHALQTGDFRTPAELALNKFEKESGHIRNQRGDYSHTFNRKDLQAELNLLFEKQKEFGNPHVSDGLKEGIETLLMTQRPALSGDAVQKMLGHCTFEPTEPKAAKNTYTAERFVWLTKLNNLRILEQGSERPLTDTERATLMDEPYRKSKLTYAQARKLLDLDDTAFFKGLRYGKDNAEASTLMEMKAYHAISRALEKEGLKDKKSPLNLSPELQDEIGTAFSLFKTDEDITGRLKDRVQPEILEALLKHISFDKFVQISLKALRRIVPLMEQGNRYDEACTEIYGDHYGKKNTEEKIYLPPIPADEIRNPVVLRALSQARKVINGVVRRYGSPARIHIETAREVGKSFKDRKEIEKRQEENRKDREKSAAKFREYFPNFVGEPKSKDILKLRLYEQQHGKCLYSGKEINLGRLNEKGYVEIDHALPFSRTWDDSFNNKVLALGSENQNKGNQTPYEYFNGKDNSREWQEFKARVETSRFPRSKKQRILLQKFDEDGFKERNLNDTRYINRFLCQFVADHMLLTGKGKRRVFASNGQITNLLRGFWGLRKVRAENDRHHALDAVVVACSTIAMQQKITRFVRYKEMNAFDGKTIDKETGEVLHQKAHFPQPWEFFAQEVMIRVFGKPDGKPEFEEADTPEKLRTLLAEKLSSRPEAVHKYVTPLFISRAPNRKMSGQGHMETVKSAKRLDEGISVLRVPLTQLKLKDLEKMVNREREPKLYEALKARLEAHKDDPAKAFAEPFYKYDKAGNRTQQVKAVRVEQVQKTGVWVHNHNGIADNATIVRVDVFEKGGKYYLVPIYSWQVAKGILPDRAVVQGKDEEDWTVMDDSFEFKFVLYANDLIKLTAKKNEFLGYFVSLNRATGAIDIRTHDTDSTKGKNGIFQSVGVKTALSFQKYQIDELGKEIRPCRLKKRPPVR

SEQ ID NO: 121 - protein, 1512 aa, Fibrobacter succinogenes
MKKILGLDLGTNSIGWAVVNADEITRDDGSRYLKPNGISAAGSRIIPMSADILGDFEKGNSISQTAERTRMRMARRLHERALLRRERLLRVLNLLDFLPKHFADKIDRYGKFTDDSEPKLAWRKNTEGKYEFIFQDAFNEMLAEFKDKQPEIVEEGKKIPYDWTIYYLRKKALEKALSKEELSWILLQFNQKRGYYQLRGEEEEIPQDKKIEYLAQKVVKVEATDQKKGDDVWYNVYLENGMIYRRTSKAPLDWEGKVKEFIVTTEVENDGETPKKDKEGNIKRSFRAPKEDDWTLLKKKTEADIENSHKTVGCYIYDSLLNNPKQKIIGKLVRTVERKFYKEELTQILKKQVELIPELRDDNLYKQCIEELYPINEAHRNTIAKTDFANLFINDILFYQRPLKSKKSQIDNCPYEERIFIDSKTGEKKKVPVKCIAKSNPLFQEFRLWQFIQNLRIYQREKEIDGKLLTDIDITSECLKSEEDYVRLFDWLNDRETIEQEDLLKHLFNTKKSKNKENPYRWNYVEDKVYPCNETRATILKGFSKCGINASVLSPELEMALWHILYSVEDKKEIETALTHFAQKQGWNDDFAKVFSKAKPFKKDYGSYSEKAIKKLLSLMRMGKYWNQDNIDKNTLDRIDKIINGEYDEKISNRVRDNAINLKDISDFRGLPVWLACYIVYDRHSEAKDCTKWNSPEEIDSYLKKFKQHSLRNPIVEQVVTETLRTVRDIWIQEEQIDEIHLELGRDLKNPADKRKKMSENILKNENTNLRIKAMLMEFMNPSMGIENVRPYSPSQQDILRIYEENALDNLTKDDKDFDFISKISKQAQPSKTDIIRYKCWLEQKYRSPYTGKTISLSKLFTPAYEIEHVIPQSLYFDDSFSNKVICEAEVNKLKDRQLGYKFIAEHHGEKVQLSQGEVVEILSVDAYEKFVKENYANNRIKMKKLLMESIPDEFIERQLNDSRYISKVVKGLLSNIVREKIDDENYEPEAVSKNLISCNGAITDRLKKDWGMNDVWNSIILPRFIRMNQITGKDCFTTTNAEGHLIPQMPLELQKGFNKKRIDHRHHAMDAIVIACTTRDHVNLLNNEAAHSKFNATRYQLQRKLRRFEKAVIDGKEREVAKEFLKPWDSFSSDSKNILENIIVSFKQNQRVINKTTNAFLHFDENGKKTFIKQGKGDSWAIRKSMHKDTVFGEINLRKVRSVSLNEAIKVPERVLNKKIKEKILELKNNKIDAKNIKKYIEENHTGGYGIDSSKIDVFYFTKETKERFFATRKTLDTSFNQAKIKDSIADSGIQKILLAHLKSKNGDAEQAFSPDGIDEMNKNIVELNNGKFHQPILKVRVYEKADKFAVGQKGNKKVKFVEAAKGTNLFFAIFEKDGKRSYLTIPLNVMIDCQKQYGNQWKNNIEAYLKEKELVEKDVKLQFILSPNDLVYLPTEGSIDKKRIYKVVSFTNNRLYAIPYAIAKSIVDKNEFTQLNKIEFTDNKESIKDACVPVIIDRLGNVIEFNGKRL

SEQ ID NO: 122 - protein, 1259 aa, Streptobacillus moniliformis
MKYILGLDLGVASIGWAVTEINEKGEPVGLIDANSVIFKPLDNDKGKLYNVERRDKRGSRRILRRKKHRVERTKMLLVNSSFLTNEEIDNLYVGKLDNIYEVRLKGLKEQLSKNEIARLMIYYCKNRGFKSNRKTEDLEILKSLGEKISEKDSDEKKLKPIIAKNTELIESKGLTPIEVIYMIRENDNSILGFKNKEGNYKFGFKRNQVIDEVRKILGTQQILSKEIVDEYIDILSSQRDFSDGPGGDSKYKIDYTKLAGKCKYTGEVRAVKSAPSYEIFTMLQKLNDIRYVKFTSEDKIEKKKLSKEVIHKLYDLVVEKNKTLTYDLIEKSIDEENIKLLNIPKLSKSKYVELRKSYFKERNDNENLTEEEINAFNEKLNNERMKQELIRNNLKAYKELKSKFKKNNIDENRIKELGGIYFLDLVAELLTYSKTDEKLEYFVENVERYSLFKEQRDIVEIIKTFPNYTKNGNLSLSLVRELNKLLMEGHDYESSLSSLNYYIDTDVDWEKFPTISEIEDSLSTKITNPNVKHILVILRKLYNTLLFKYGRPEKVHLELSRDFSNDFSTRNKIQKEQLENKVRREVAAFEMYGANKDIVAGKDRLSNDDFVRIKLWEEQNKVCMYSGRTIEKYQLTSAEVQIDHILPYSKSFDNSYSNKVLVFSNENQDKKERTPYQWLKGTEKWNEFKQRVRLNLNISNKKKENLLFEDEVVNNEFLERELHATSYSSRLALNIFQRLIPVSDEDKYDEHGNEKVKYLYNRNVIAFQGKMTSMLRNLYSLNKYTHSFESDTLDIDNKAFILKEFEINKDNLKMTAYNVNTGLEITSETKVEKNKSGEFKTIKDELLKKELDKKENLIEISDYFKDKVLFDLKIVDFEEIDTVEPEIISILYKMITALKEEVYSKNRENHLHHSLDAFLLTIMNRSMQMKLIKYNQLISVLKNKEIEIFNEEKGEYIDSKEFAEELQKQKIIDIDGNERGIKFNVNGKTHRLNLVKPYENFLDDIKNKIFDKRENNKLPYHVVKSKVSGALHAETILGESKGEITKRISVFDINYKNLGKIFDKDGSQKEIYETLVKWLEAKSKDYPKLKNGNIIKKVKIVDGNKDKLIKLGNKRYVEMGRTTVKILVLKKEAEEGLKFASIGRYKYNLLKSEKDVNISIWKDAIHFCKVRYNKLKENGYRLIHELIPGETIELELNKGNISKCLVVGFSGGKIEISSVIGDALDLINDKISTRIKERYYITVSTIKSIKKINKNILGD

SEQ ID NO: 123 - protein, 1091 aa, Mobiluncus mulieris
MDSRKYRVGIDVGTNSVGFAAVEEDDSGSPTRFLNTMVVIHDSGVDPEQKKYAITRLASAGTARRTRRLYRTRRQRLRELDDFISNELGYPLVNLENFADPYEPWKVRADLATTKLPNDELPEAMSIALRHMARHRGWRSPYQRVEALHLHAEISKEFAALKERVVEKTGDVFSDDATPAEVLVDLMGRQKVRGADGVLSGKLRQSDNANELRKIASVQGIDDETLNRIIDRVFSSKSPKGKASERVGMDALPGQGSKPRALKAMPSFQKFRVVSVICNLRIKDSGGDARPLSMEEKEKLIDYLMSSTTDDHVTWTDVADLLHVKRSQLQGTAKEGFDGERPYTRPPVNSTWSKIKDSKIKSLVALWKTGDVDVQSAIVEALSNASVLEDSRPGADIVVAYLESLDDKELESLDKVGLPAGRASYSEDSLERLTERMLRDDCDLFEARKREFNVADDWKPPADPIYAPVGNPGVDRVLKIVNRLLMAAEREWGAPTQINIEHVRSGFSSELMQREFERENERRRAQNEEAVKAILTEKGGNSRVSKYDITRYYAVKRQHCQCLYCGTPITFSDCELDHIVPRKGVGSTNTRVNLAAACRSCNRDKSNLPFAVWAGKASNFDVSIDDAVSRVKQWQRSQNEGVREFRAFQNEVISRLLKTTEDPEIDSRSLESVAWMARELHHRVEYYFQSKGAQTQVSVYRGAVTAQARKSSGLEDKVKMIGGGGKTRLDRRHHAMDAATIALMTPGISTTLSEKNNLRDAQKFTGQSETWKDYCGRTETARKHFAVWKSNMERLTDLFNDKLENDAIPVVQPLRLRLSNSKAHDDGIGKLDSKKLGSVWSLADIDRAATPQIWTALTRCDDFDPTKGLPENANRVIRAQGVKYESEDNIPVFPSNVAAIAVRDGYAEIGSTIHHARIYRIDDGKKTFYSMIRVFAVDLLKHQAEDLFTVKLPPSAISIRTCEDSLRRALSNGTAEYLGWLVPGDEIIVDTSDKAFHTGQIGDLLRNFPVNSFRLTGFPSNSRLRLKPVLLAGEGLRDDAEDSIKKILLGQGWRPAINVLFSKGKPRIVRRNSLGIERPSSNNGLPFSWEA

SEQ ID NO: 124 - protein, 872 aa, Candidatus Parvarchaeum
MLGSSRYLRYNLTSFEGKEPFLIMGYYKEYNKELSSKAQKEFNDQISEFNSYYKLGIDLGDKTGIAIVKGNKIILAKTLIDLHSQKLDKRREARRNRRTRLSRKKRLARLRSWVMRQKVGNQRLPDPYKIMHDNKYWSIYNKSNSANKKNWIDLLIHSNSLSADDFVRGLTIIFRKRGYLAFKYLSRLSDKEFEKYIDNLKPPISKYEYDEDLEELSSRVENGEIEEKKFEGLKNKLDKIDKESKDFQVKQREEVKKELEDLVDLFAKSVDNKIDKARWKRELNNLLDKKVRKIRFDNRFILKCKIKGCNKNTPKKEKVRDFELKMVLNNARSDYQISDEDLNSFRNEVINIFQKKENLKKGELKGVTIEDLRKQLNKTFNKAKIKKGIREQIRSIVFEKISGRSKFCKEHLKEFSEKPAPSDRINYGVNSAREQHDFRVLNFIDKKIFKDKLIDPSKLRYITIESPEPETEKLEKGQISEKSFETLKEKLAKETGGIDIYTGEKLKKDFEIEHIFPRARMGPSIRENEVASNLETNKEKADRTPWEWFGQDEKRWSEFEKRVTSLYSKKKISERKREILLNKSNEYPGLNPTELSRIPSTLSDFVESIRKMFVKYGYEEPQTLVQKGKPIIQVVRGRDTQALRWRWHALDSNIIPEKDRKSSFNHAEDAVIAACMPPYYLRQKIFREEAKIKRKVSNKEKEVTRPDMPTKKIAPNWSEFMKTRNEPVIEVIGKVKPSWKNSIMDQTFYKYLLKPFKDNLIKIPNVKNTYKWIGVNGQTDSLSLPSKVLSISNKKVDSSTVLLVHDKKGGKRNWVPKSIGGLLVYITPKDGPKRIVQVKPATQGLLIYRNEDGRVDAVREFINPVIEMYNNG

SEQ ID NO: 125 - protein, 1229 aa, Pediococcus acidilactici
MGDRKYNLGLDIGTSSIGFAAVDENNQPIRVKGKTAIGVRLFEEGKTAADRRGFRTTRRRLSRRRWRINLLNEIFDAHLAEVDPTFLARLKESNRSNLDPKKSFQGSLLFPERKDYQFYEEYPTIYHLRKALMEKDRKFDIREIYLAVHHIIKYRGNFLNGTPMRSFKVENIELNTLFDQLNQLYAEIVPDNELAFDLAQVADVKDVLSSTTIYKMDKKKQLVKMMLLPASNKALQSENKKIVTQFVNAILNYKFKLDVLLQVETDADWSLKLNDEGADDKLEEFTGDLDENRLEIIDLLQRLHNWFSLNEITKDGNSLSAAMVEKYENHHHHLGLLKKVIENHPDAKKAKALKETYTAYVGKTDDKTQNQDDFYKAVEKNLDDSPDAKGIKRLIQLDQFMPKQRTGQNGAIPHQLHQQELDQIIEKQSKYYPFLAEPNPNVKRRKDAPYKLDELIAFKIPYYVGPLVTPEEQAQNKENVFAWMKRKAAGPITPWNFDEKVDRMESANRFIRRMTTKDTYLFGEDVLPAESMIYQKFVVLNELNNLKINGRHLSLKDKQDVYNDLFKQQKTVSIKALQNYYVTKKKAATAPTVGGLADPKKFLSSLSTYIDFKNMFGERVNDPQFQEDLEQIVEWSTIFEDRGIFKAKLQALGWLSEKQIQQLVAKRYKGWGRLSKKLLTGLKNAEGYSILDEMWRSTENFMQIQSRPEFAALIQQANEKQFEGNDPDNVWENIENILGDAYTSPQNKKAIRQVVKVVQDIEKAVGNPPEKIAIEFTREAAANPQRTQSRLRTLEKLYESAEEVVDAGLTAELAEFKENKHVLSDKYYLYFTQLGRDVYTGDTISLDKLNDYDVDHILPQSFIKDDSLDNRVLTIRAVNNGKSDNVPAKMFGKKMGSFWRHLLDNGMISKRKYNNLITDPDNISKYAQKGFINRQLVETSQVIKLTANILNGIYDKDTEIIEVPAKMNSQMRKMFDLVKVREVNDYHHAFDAYLTIFIGNYLYKCYPKLRPYFVYDNFKKFGNKEDIGHKRFNFLGKIEREKKVVAPETGEILWSNVAPNETIKQIKKVYNYKFMIVSREITTRRAELFNQTVYPKNYRGKLIPIKEDRPTDLYGGYSGNTDAYLAIVALEDKKKGKYFKVVGIPTRAAAKLEKLKQQDSQQYLQALHEVIAPQFTKSTKKGIKKTEFEIVLDKVHYRQLVQDGPVKMMLGSSTYKYNAKQLVLSEKAL

SEQ ID NO: 126 - protein, 1398 aa, Veillonella parvula
METQASNQLISSHLKGYPIKDYFVGLDIGTSSVGWAVTNKAYELLKFRSHKMWGSRLFDEGESAVARRGFRSMRRRLERRKLRLKLLEELFADAMAQVDPTFFMRLRESKYHYEDKTTGHSSKHILFIDKNYNDQDYFKEYPTVYHLRSELMKSGTDDIRKLFLAVHHILKYRGNFLYEGATFDSNASTLDDVIKQALENITFNCFDCNSAISSIGQILMEAGKTKSDKAKAIEHLVDTYIATDTVDTSSKTQKDQVKEDKKRLKAFANLVLGLNASLIDLFGSVEELEEDLKKLQITGDTYDDKRDELAKAWSDEIYIIDDCKSVYDAIILLSIKEPGLTISESKVKAFNKHKDDLAILKSLLKSDRSIYNTMFKVDEKGLHNYVHYIKQGRTEETSCNREDFYKYTKKIVEGLSDSKDKEYILSQIELQILLPLQRIKDNGVIPYQLHLEELKAILAKCGPKFPFLNEVADGFSVAEKLIKMLEFRIPYYVGPLNTHHNVDNGGFAWAVRKASGRVTPWNFDDKIDREKSAAAFIKNLTNKCTYLLGEDVLPKSSLLYSEFMLLNELNNVRIDGKPLEKVVKEHLIEAVFKQDHKKMTKNRIEQFLKDNGYISETHKHEITGLDGEIKNDLASYRDMVRILGDGFDRSMAEEIITDITIFGESKKMLRETLRKKFASCLDDEAIKKLTKLRYRDWGRLSQKLLNGIEGCDKAGDGTPETIIILMRNFSYNLMELLGDKFSFMERIQEINAKLTEGQIVNPHDIIDDLALSPAVKRAVWQALRIVDEVAHIKKALPARIFVEVTRSNKNEKKKKDSRQKRLSDLYAAIKKDDVLLNGLNNEIFGELKSSLAKYDDAALRSKKLYLYYTQMGRCAYTGEIIELSLLNTDNYDIDHIYPRSLTKDDSFDNLVLCKRTANAQKSDAYPISEEIQKTQKPFWTFLKQQGLISERKYERLTRITPLTADDLSGFIARQLVETNQSVKAATTLLRRLYPGVDVVFVKAENVTDFRHDNNFIKVRSLNHHHHAKDAYLNIVVGNVYHERFTRNFRAFFKKNGANRTYNLAKMFNYDVNCTNAKDGKAWDVKTSMDTVKKMMDSNDVRVTKRLLEQTGALADATIYKATVAGKAKDGAYIGMKTKSSVFADVSKYGGMTKIKNAYSIIVQYTGKKGEVIKEIVPLPIYLTNRNTTDQDLINYVASIIPQAKDISIIYGKLCINQLVKVNGFYYYLGGKTNSKFCIDNAIQVIVSNEWIPYLKVLEKFNNMRKDNKDLKANVVSTRALDNKHTIEVRIVEEKNIEFFDYLVSKLKMPIYQKMKGNKAAELSEKGYGLFKKMSLEEQSIHLIELLNLLTNQKTTFEVKPLGITASRSTVGSKISNQDEFKVINESITGLYSNEVTIV

SEQ ID NO: 127 - protein, 1485 aa, Prevotella bivia
MKNILGLDLGTNSIGWAKISIDDNGKYIKDSIKLGSRIIPMSQDVLSNFSKGVTLSQTSERTSFRGARRLRERTLLRRERLHRILHLLGFLPKHYEKAIGWDRNDNKTYGKFINHAEPKLAWCKDNNGKMRFLFMDSFHDMLSEFSEKHPELLANGKKIPLDWTIYYLRKKALYKAITKEELAWILLNFNQKRGYYQLRGEEDRDSEANKKEYLELKVIGVEATGEKKGNDIWYNIHLENGWIYRRSSKNPLNDWLGKVKSFIVTTDLDADGNPKKDKDGNIKRSFRAPSEGDWTLIKKRTESLLENSGQTVGQFIYNHILEEPSAKIRGNFIRTIERKYYKDELKAILEKQKEFHHELSSESLLTECAKELYKRNIAHQEVLLKKGIIHLLLNDILFYQRPLKIKKSLIDNCPYENYKYVDKKSGDIKVKSIKCIAKSNPFFQEFRLWQFVSNLRLYRKSDDKDVTSEHLVTTDDYANLFTYLNNRKDIKQSVLLKEYFKIKKVKTINGAEYPVRWNYIDDDNKTYPCNETRYDILHALSKTELKSEWLTPERTYRLWHLLYSIESKEETKKALNKLNLSDDFTEAFLTIKPFKKEYGSYSEKAIKKLLSLMRMGYLWSEDEAIKQVGAEIEKTIEGELPDYVLQRLEKSQHNYNKISDFSGLPLWLASYIIYGRHSEAKEIIHWDNPESMMAYIKDFRQHSMRNPIVEQCVLETLRTVHDIWKEIGHIDEIHIELGREMKSTSEQRKAITQNVLHNQNTNIRIKLLLQELKNDNNITGVRPYSPMQQEILRIYEEGALQGLTKEDKDYNDILKISQTAQPTSNELTRYKLWLEQKYRSPYTGKAISLSKLFTSAYQIEHVIPQSRYFDDSLSNKVICESEVNTLKKAMLGMEFIKTCGGQKVHCTLLGDVEIYNEEDYKAFVNEHYSNNRTKRNKLLMEDIPQEFINRQLNDSRYISKMVKQLLSAIVRGQEEVEATSKFVIPCTGGITDRLKKDWGLNDIWNNLVSPRFQRMNALTGSEYFGHWENKEGKRVFQTTMPIQLQQGFSKKRIDHRHHAMDALVIACASRNIISYLNNETAQDTERRRDLRQKLCDKGGSVRKPWDSFTQDTQYALKDIIVTFKNYVRIINKATNYYEHYKTDGKKGMISQKGDELWAIRKPMHKETVFGKVNLRRPKRVSLSKAIDSVDIICNRKLKKYIKARLNEGLQKKQILNIFKELNNVWEGIDVNKIDIWEMSNDKEPMVATRKQLDTSFDEKKIRSISDTGIQKILLNYLITKNNNPELAFTPEGIQEMNSNISEYNDHKKHQPIYKVRVTEPLGAKYPIGTMGNNPKKFVEAQAGTNLYFAIYEDKEGKRNYDTIPLNIAAERLNQQLSPVPETNENNTPLKFYLSPNDLVYVPSEEERHSGNNIQLDKNRIYKMVSSTSKRCFFIHHRVAISLVDKKEFSAQNKMERSIDNEQVMIKSVCWKLITDRLGNIIKVIK

SEQ ID NO: 128 - protein, 1218 aa, Prevotella buccalis
MNKRILGLDTGTNSLGWAVVDWDEHAQSYELIKYGDVIFQEGVKIEKGIESSKAAERSGYKAIRKQYFRRRLRKIQVLKVLVKYHLCPYLSDDDLRQWHLQKQYPKSDELMLWQRTSDEEGKNPYYDRHRCLHEKLDLTVEADRYTLGRALYHLTQRRGFLSNRLDTSADNKEDGVVKSGISQLSTEMEEAGCEYLGDYFYKLYHEQGNKVRIRQRYTDRKKHYQHEFDAICEKQELSSELIEDLQRAIFFQLPLKSQRHGVGRCTFERGKPRCADSHPDYEEFRMLCFVNNIQVKGPHDLELRPLTYEEREKIEHLFFRKSKPNFDFEDIAKELAGKKNYAWIHDKEERAYKFNYRMTQGVPGCPTTAQLKSIFGDDWKTGIAETYTLIQKKNGSKSLQEMVDDVWNVLYSFSSVEKLKEFAHHKLQLDEENAEKFAKIKLSHSFAALSLKAIRKFLPFLRKGMYYTHASFFANIPTIVGKEIWNNEQSRKYIMENVGELVFNYQPKHRDVQGTIEMLIKDFLANNFELPAGATDKLYHPSMIETYPHALRNEFGILQLGSPRTNAIRNPMAMRSLHVLRRVVNQLLKESIIDENTEVHVEYARELNDANKRRAIADRQKEQDKQHKKYGDEIRKLYKEETGKDIEPTQTDVLKFQLWEEQNHYCLYTGEQIGITDFIGSNPKFDIEHTIPQSVGGDSTQMNLTLCDNRFNREVKKAKLPTELANHEEILTRIEPWKNKYEQLVKERDKQRTFAGMDKAVKDIRIQKRHKLQMEIDYWRGKYERFTMTEVPEGFSRRQGTGIGLISRYAGLYLKSLFHQADSRNKSNVYVVKGVATAEFRKMWGLQSEYEKKCRDNHSHHCMDAITIACIGKREYDLMAEYYHMEETFRQGRGSKPKFSKPWATFTEDVLNIYKNLLVVHDTPNNMPKHTKKYVQTSKGKVLAQGDTARGSLHLDTYYGAIERDGEIRYVVRRPLSSFTNPKELENIVDETVKRTIKEAIADKNFKQAIAEPIYMNEDKGILIKKVRCFANSVKQPINIRQHRDLSKKEYKQQYHVMNENNYLLAIYEGLVKNKVVREFEIVSYIEAAKYYKRSQDRNIFSSIVPTHSTKYGLPLKTKLLMGQQVLMFEENPDEIQVDNTKDLVKRLYKVVGIEKDGRIKFKHHQEARKEGLTIYSTPYKNNDDYVPIFRQSIKNINILVDGIDFNIDILGKVTLKE

SEQ ID NO: 129 - protein, 1218 aa, Prevotella timonensis
MNKRILGLDTGTNSLGWAVVDWDEHAQSYELIKYGDVIFQEGVKIEKGIESSKAAERSGYKAIRKQYFRRRLRKIQVLKVLVKYHLCPYLSDDDLRQWHLQKQYPKSDELMLWQRTSDEEGKNPYYDRHRCLHEKLDLTVEADRYTLGRALYHLTQRRGFLSNRLDTSADNKEDGVVKSGISQLSTEMEEAGCEYLGDYFYKLYDAQGNKVRIRQRYTDRNKHYQHEFDAICEKQELSSELIEDLQRAIFFQLPLKSQRHGVGRCTFERGKPRCADSHPDYEEFRMLCFVNNIQVKGPHDLELRPLTYEEREKIEPLFFRKSKPNFDFEDIAKALAGKKNYAWIHDKEERAYKFNYRMTQGVPGCPTIAQLKSIFGDDWKTGIAETYTLIQKKNGSKSLQEMVDDVWNVLYSFSSVEKLKEFAHHKLQLDEESAEKFAKIKLSHSFAALSLKAIRKFLPFLRKGMYYTHASFFANIPTIVGKEIWNKEQNRKYIMENVGELVFNYQPKHREVQGTIEMLIKDFLANNFELPAGATDKLYHPSMIETYPNAQRNEFGILQLGSPRTNAIRNPMAMRSLHILRRVVNQLLKESIIDENTEVHVEYARELNDANKRRAIADRQKEQDKQHKKYGDEIRKLYKEETGKDIEPTQTDVLKFQLWEEQNHHCLYTGEQIGITDFIGSNPKFDIEHTIPQSVGGDSTQMNLTLCDNRFNREVKKAKLPTELANHEEILTRIEPWKNKYEQLVKERDKQRTFAGMDKAVKDIRIQKRHKLQMEIDYWRGKYERFTMTEVPEGFSRRQGTGIGLISRYAGLYLKSLFHQADSRNKSNVYVVKGVATAEFRKMWGLQSEYEKKCRDNHSHHCMDAITIACIGKREYDLMAEYYRMEETFKQGRGSKPKFSKPWATFTEDVLNIYKNLLVVHDTPNNMPKHTKKYVQTSIGKVLAQGDTARGSLHLDTYYGAIERDGEIRYVVRRPLSSFTKPEELENIVDETVKRTIKEAIADKNFKQAIAEPIYMNEEKGILIKKVRCFAKSVKQPINIRQHRDLSKKEYKQQYHVMNENNYLLAIYEGLVKNKVVREFEIVSYIEAAKYYKRSQDRNIFSSIVPTHSTKYGLPLKTKLLMGQLVLMFEENPDEIQVDNTKDLVKRLYKVVGIEKDGRIKFKYHQEARKEGLPIFSTPYKNNDDYAPIFRQSINNINILVDGIDFTIDILGKVTLKE

SEQ ID NO: 130 - protein, 1487 aa, Prevotella timonensis
MKNILGLDLGSNSVGWALVKVEENGNPIGSIKMGSRIIPMSQDILGSFEKGDTVSQTAQRTLYRGKRRLIERHVLRRERLCRVLHIMNFLPAHFDRLLGWDKTDNKTYGKFIDDSEPKLAWRQNKNEMGKMEFVFMDSFHEMLSDFAKHQPQLIANGKKVPLDWTIYYLRKKALTQLISKEELAWILLNFNKKRGYYQLRGEEEEEQPTKKEEYKVLKVISVDADEGQKGNGIWYNIHLEDGGIYKKKSDIPLYDWVGKTLQLIVVTTYEKDGKTPKIFDSGKQNPSYRLPKEDDWGLVKKRTESQLQSSGKTVGAFIYDNILSKPDDKIRGNLVRTIERKYYKKELIEILQQQAKYHDELHNQNLLESCAKELYAHNDVHYNEVIKSNMINLLVNDIIFYQRPLKSKKSLIANCKYESYEYVDKETGEIKEMPIKCIAKSNPYYQEFRLWQFIHNLRLSDVVTREDVTAQYLSTPQDYCNLFTYLNDRKEIKQDILLKDFFKIKKVQIDKEKVFPIEWNYIKDATKSYPCNETRYELLSALKRAGMDKQWLDDTPNMQYRLWHLLYSVEEKEESAKALRKLYDDDKFVTSFLKIKPFNKCYGAYSEKAIKRLLTLMRMGKAWNEQAIDAKTLKCIQQIITDNVDSKLKEKIDDSRYVLHHVSDFQGLPTYLASYVIYGRHSEVTDIQCWDSPEDLLKFIRDFKQHSLRNPIVEQVILETLRVVYDIWKAEKHIDEIHVEVAREMKLTAQQRNEANLRNLNNEATNLRIKYLLEELKNDTFIKDVRPLSPIHQEKMRIYEQAVLGNLNKQDKDYDDIIKISKKEHPTNAELIRYKLWLEQRYCSPYTGKAISLSKLFTTAYEIEHIIPQSRYFDNSFNNKVICEAEVNKAKGNMLGYEFIKKQGGQKIYCTQLGKAVTILKEEAYKQFVNEHYAHNKRKRDNLLAENIPESFSSRQLNDTRYITKTIMSLLSNVVRQQSEEEATAKNLLPSSGSVTDRLKNDWGLKDVWNTIVTPRFERLNKLSGTNDFGEMKEENGNRYFQTNVPLEYEKGFKKKRIDHRHHAMDALVIACTTRNMVNYISNANANSPKQREDLRQLLCDKNRIINKPWDTFTQDALKALNDIVVSFKNNVRIINRATNRYQRYDKNGKKIIFSQKGDDMWAIRKSMHKETVFGRVNLIRKEVLPIAKALDNISAICNAQLRAYVNDLVDKHFNKKQLVAHFKSLNYKWNRQDVSKVEVWISSDNKTPMVAVRKPLDTSFDKKKIASITDTGIQTILLNYLESKGGDASVAFAPEGIQEMNSNIELYNNGKAHKPIKNVRLSEPLGAKYQVGERGAKTKKYVEADKGTNLFFAIYEDEEGKRYYYSVPLREAIERQKQKLSPVPEYNEKGVALKFYLSPNDLVYVPTEEERTMGTCHIDKARIYKMVSSTGCSCYFVPSTFAKVIVDKVELQSLNKMEKAITDECIKEVCWKLKVDRLGNIINVIK

SEQ ID NO: 131 - protein, 1138 aa, Bifidobacterium dentium
MLCRCHRRYRIGIDVGLMSVGLAAIEVDETGFPIRILNIQSVIHDGGIDPQLGKKKSISRKAISGVARRTRRMRRRKVVRLRQLDATLESLGFPIVEPDSLDTWEIWLTRAKLASSYIQDDETRKEDVSIALRHIARHRGWRNPYSNVESLFVDVAPSEQYEELRRKAEEKLGTSLSGNPTSAEIVECILKRQVGEVQLRTRSRKGVNGNAVEKEGLLPTKLMQSDNAAEIRRIFKVQRIDDETGRKLLRAVFKACSPKGSVERRVGRDALAPGLPRALKASLAFQEYRIANVLTNLVISEDGTKRKLTIAEKQRVFGFLSSNETDDITWIDVAEKLGLERRQIQGVGCLTADGEERISSTPPRNITALHIHSAKPVIREKLVAWWKAASPTVRETMVELLSNTVDIDRVREDMDYSSAVAFIDSLGDEELTALDSVDLLSGRAAYSRQTLKQLTERMLNTDDDLHEARKAVFGVDDNWKPPVDAISTSVGNPAVDRVLKIVNRYLLACQKRWRNPQSVQIEHVRESFSSVAKAKETERVQGERARYRNDLRRELCEQEGLNKIRESDIRRWESVQRQNGTCLYCGSPITFRTCEMDHIVPRKGVGSTNTRVNLAAACAACNKLKSNTAFSVWARTEGAANRKVSQRDAIERVKTFIFNKSVPPREQRAFKQAVISRLRQAESDPAIDNRSIESVAWMADELHRRIEAYFNQDADVSGNTPATQVWVFQGRVTALARKASGIEGRIHFAGEWKKTRLDRRHHAVDAAVIAMMNHSAAQTLVERDSLRLSQWITRKPETWKNYPFSEGQKKTRFKEWLDCMNALLDLLNDALDSDRVPVTRCQRMSLGNSQAHAATIRKMKRVELFSPMDADLIRRASTPALYCALTRLPEYSPEKGLPENRGREIVLNGRHIRSTETVDFFASGAAQLMVRNGSAEIGDSIHHMRIYRYRKTGAKSQEYVYGMIRVFQIDLLHASSENLFAVQLPSQSVSVRYGDKNVVQAIQEGRAEYLGHIVPNDEILISYEGVRMKDSEKIGAYANDFSGTASELAQRRHWVVVGSDVSKLALRPSYLSEEGLENSGSESERLSKQTRKVIEGKGWVVAVNILAKYHPVVIRRNALGEPRFRTNSGMPVSWRWDR

SEQ ID NO: 132 - protein, 587 aa, Neisseria subflava
MATSRSRIRSQTDAFGVVGSLVAFNQTSRLFVAKKNEGETADKELGALLKGVADNAHALQTGNFRTPAELALNKFEKESGHIRNQRGDYSHTFNRKDLQAELNLLFEKQKEFGNPHVSDGLKEGIETLLMAQRPALSGDAVQKMLGYCTFEPTEPKAAKNTYTAGRFIWLTKLNNLRILEQGSERPLTTTERATLMDEPYRKSKLTYAQARKLLGLEDTAFFKGLRYGKDNAEASTLMEMKAYHAISRALEKEGLKDKKSPLNLSPELQDEIGTAFSLFKTDEDITGRLKDRVQPEILEALLKHISFDKFVQISLKALRRIVPLMEQGKRYDEACAEIYGDHYGKKNAEEKIYLPPIPADEIRNPVVLRALSQARKVINAVVRRYGSPARIHIETAREVGKSFKDRKEIEKRQEENRKDREKAAAKFREYFPNFVGEPKSKDILKLRLYEQQHGKCLYSGKEINLGRLNEKGYIEIDHALPFSRTWDDSFNNKVLVLGSENQNKGNQTPYEYFNGKDNSREWQEFKARVETSRFPRSKKQRILLQKFDEDGIYRIGVKTALSFPKYQIDELGKEIRPCRLKKRPPVR

SEQ ID NO: 133 - protein, 1269 aa, Mycoplasma gallisepticum
MNNSIKSKPEVTIGLDLGVGSVGWAIVDNETNIIHHLGSRLFSQAKTAEDRRSFRGVRRLIRRRKYKLKRFVNLIWKYNSYFGFKNKEDILNNYQEQQKLHNTVLNLKSEALNAKIDPKALSWILHDYLKNRGHFYEDNRDFNVYPTKELAKYFDKYGYYKGIIDSKEDNDNKLEEELTKYKFSNKHWLEEVKKVLSNQTGLPEKFKEEYESLFSYVRNYSEGPGSINSVSPYGIYHLDEKEGKVVQKYNNIWDKTIGKCNIFPDEYRAPKNSPIAMIFNEINELSTIRSYSIYLTGWFINQEFKKAYLNKLLDLLIKTNGEKPIDARQFKKLREETIAESIGKETLKDVENEEKLEKEDHKWKLKGLKLNTNGKIQYNDLSSLAKFVHKLKQHLKLDFLLEDQYATLDKINFLQSLFVYLGKHLRYSNRVDSANLKEFSDSNKLFERILQKQKDGLFKLFEQTDKDDEKILAQTHSLSTKAMLLAITRMTNLDNDEDNQKNNDKGWNFEAIKNFDQKFIDITKKNNNLSLKQNKRYLDDRFINDAILSPGVKRILREATKVFNAILKQFSEEYDVTKVVIELARELSEEKELENTKNYKKLIKKNGDKISEGLKALGISEDEIKDILKSPTKSYKFLLWLQQDHIDPYSLKEIAFDDIFTKTEKFEIDHIIPYSISFDDSSSNKLLVLAESNQAKSNQTPYEFISSGNAGIKWEDYEAYCRKFKDGDSSLLDSTQRSKKFAKMMKTDTSSKYDIGFLARNLNDTRYATIVFRDALEDYANNHLVEDKPMFKVVCINGSVTSFLRKNFDDSSYAKKDRDKNIHHAVDASIISIFSNETKTLFNQLTQFADYKLFKNTDGSWKKIDPKTGVVTEVTDENWKQIRVRNQVSEIAKVIEKYIQDSNIERKARYSRKIENKTNISLFNDTVYSAKKVGYEDQIKRKNLKTLDIHESAKENKNSKVKRQFVYRKLVNVSLLNNDKLADLFAEKEDILMYRANPWVINLAEQIFNEYTENKKIKSQNVFEKYMLDLTKEFPEKFSEFLVKSMLRNKTAIIYDDKKNIVHRIKRLKMLSSELKENKLSNVIIRSKNQSGTKLSYQDTINSLALMIMRSIDPTAKKQYIRVPLNTLNLHLGDHDFDLHNMDAYLKKPKFVKYLKANEIGDEYKPWRVLTSGTLLIHKKDKKLMYISSFQNLNDVIEIKNLIETEYKENDDSDSKKKKKANRFLMTLSTILNDYILLDAKDNFDILGLSKNRIDEILNSKLGLDKIVK

SEQ ID NO: 134 - protein, 1354 aa, Prevotella melaninogenica
MADFAKYQPGMVADGRKIPLDWTLYYLRKKALTQAIRKEELAWILLNFNQKRGYYQLRGEEEEENSTKHEEYYELKVVSVEAAEEGKGGNTWYNVTLENGWIYRRQSKIELNDWVGKVRPFIVTTEYEIDGVTIKKDKNGEVKRSFRAPSENDWGLRKKRTESLLEESGKTVGAFIYNHILSEPADKIRGNFIRTIERKFYKKELEAILREQSKHQKELKDIDTLIACIKELYPNNKPHQDSLIKKDMTYLLITDLIFYQRPLKSKKSLIADCPYEYYEYVIKETGENKRQSIKCIAKSNPYYQEFRLWQFIINLRLFDRNNDKEVTSEYLSSMEDYTRLFTYLNDRKDINQETLLKDFFKQKKVKRGMEKEFPIRWNYIEDKEKKYPCNETRHELLTALGKVGIDHSWLDDKELFYRLWHLLYSVESKEEAEGALRKLVDNDDFVNAFLKIKPFKKEYGAYSEKAIKKLLAVMRMGNLWNEVDICEQTRDRIQNIIKGDIDEKIKDRMGRTFSQLSDFQGLPEWLACYVVYGQHSEATDIQRWTKPENLMAYINGFKQHSLRNPIVEQCILETLRTVHDIWKEAGHIDEIHIELGRGMKSTADQRARMSKSIMQNENTNLRIKSLLMELKNAKEFENVRPYSPMQQEILRIYEEGALQELTKEDAQYNEISKISQMAQPSANELLKYRLWLEQKYCSPYTGKPISLSKLFTSAYQIEHIIPQSRYFDDSFTNKVICEAEVNQLKSNMLGYEFIKKHGGEIVRCTMIGDVKLLDAKEYYNFVTEHYTNNRRKKEKLLMEDIPQEFLNRQMNDSRYISKKVMAILSNIVREEDEQEAKSKFVIACSGGITDRLKQDWGLNDVWNSIVYPRFERLNKLTNTENFGRWENKKGKQVFQTSVPLELQKDFSKKRIDHRHHAMDALVIACASNNIINYLNNESAKSQEKREDLRKKLCDKNRIIRKPWETFTQDAHTALENVVVSFKNYIRVINKATNYYEKYDKNGKKEIAEQKGQDMWAIRKPMHKETVFGQVNLRRKITIKLKDALEKIPAICDKELRDYINILVAKQFNKKQILAHFKSINYRLNMKSVDKVDVWQFSNEKEPMVATRKSVDTSFDTKRIATITDTGIQKILLNYLKAKNNDPNIAFTPEGIAEMNKHITEYNNGKQHQPILKVRVSEPKGAKYQVGETGNKRSKFVEAQKGTNLYFAIYEDKEGNRSYNTIPLNEVIERLKQGLSPVPDANEKSIPLKFHLSPNDLVYVPKTDEENEIKMGQIYKFVDSSGTTANFVPHRVSNLIYNVDKKIAENFCNHEIIQNEYGIGSPQSKNQKSITGEMIKAVCWKLEVDRLGNIHKIIK

SEQ ID NO: 135 - protein, 1130 aa, Streptococcus gallolyticus
MTNGKILGLDIGIASVGVGIIEAKTGKVVHANSRLFSAANAENNAERRGFRGSRRLNRRKKHRVKRVRDLFEKYEIVTDFRNLNLNPYELRVKGLTEQLTNEELFAALRTISKRRGISYLDDAEDDSTGSTDYAKSIDENRRLLKTKTPGQIQLERLEKYGQLRGNFTVYDENGEAHRLINVFSTSDYEKEARKILETQADYNKKITAEFIDDYVEILTQKRKYYHGPGNEKSRTDYGRFRTDGTTLENIFGILIGKCSFYPDEYRASKASYTAQEYNFLNDLNNLKVPTETGKLSTEQKEALVEFAKSTATLGPAKLLKEIAKILDCKVDEIKGYREDDKGKPDLHTFEPYRKLKFNLDSVNIDDLSREVLDKLADILTLNTEREGIEDAIRHNLPNQFTEGQISEIIKVRKSQSTAFNKGWHSFSAKLMNELIPELYATSDEQMTILTRLEKFKVNKKSSKNTKTIDEKEVTDEIYNPVVAKSVRQTIKIINAAVKKYGDFDKIVIEMPRDKNADDEKKFIDKRNKENKKEKDDALKRAAYLYNGTDKLPDEVFHGNKQLETKIRLWYQQGERCLYSGKPIPIQELVHNSNNFEIDHILPLSLSFDDSLANKVLVYAWTNQEKGQKTPYQVIDSMDAAWSFREMKDYVLKQKGLGKKKRDYLLTTENIDKIEVKKKFIERNLVDTRYASRVVLNSLQSALRELGKDTKISVIRGQFTSQLRRKWKIDKSRETYHHHAVDALIIAASSQLKLWEKQDNPMFVDYGNNQVVDKQTGEILSVSDDEYKELVFQPPYQGFVNMISSKGFEDEILFSYQVDSKYNRKVSDATIYSTRKAKIGKDKKEETYVLGKIKDIYSQNGFDTFIKKYNKDKTQFLMYQKDPLTWENVIEVILRDYPTTKKSEDGKNDVKCNPFEEYRRENGLVCKYSKKGKGTPIKSLKYYDKKLGNCIDITPEGSKNEVVLQSLNPWRADVYFNPETLKYELLGLKYSDLSFEKGTGKYHISQEKYDVIKEKEGIGKKSEFKFTLYRNDLILIKDTASGEQEIYRFLSRTMPNVKHYAELKPYDKEKFDNVQELVEALGEADKVGRCIKGLNKSNLSIYKVRTDVLGNKYFVKKEGDKPKLDFKNNKK

SEQ ID NO: 136 - protein, 1371 aa, Streptococcus gallolyticus
MTEKNYSIGLDIGTNSVGWAVITDDYKVPAKKMKVLGNTDKKYIKKNLLGALLFDNGETAEATRLKRTARRRYTRRKNRLRYLQEIFAEEMAKVDESFFYRLDESFLTTDDKDFERHPIFGNKADEIKYHQEFPTIYHLRKHLADSHEKADLRLIYLALAHMIKFRGHFLIEGELNAENTDVQKLFEAFVEVYDRTFDDSNLSEITVDASSILTEKFSKSRRLENLIKHYPTEKKNTLFGNLVALALGLQPNFKTSFKLSEDAKLQFSKDTYEEDLEELIGKIGDEYADLFTSAKNLYDAILLSGILTVADNTTKAPLSASMIKRYNEHQVDLKKLKEFIKNNASDKYDEIFNDKDKNGYAGYIENGVKQDEFYKYLKTTLSKIDGSDYFLDKIEREDFLRKQRTFDNGSIPHQIHLQEMHAILRRQGEHYAFLKENQAKIEKILTFRIPYYVGPLARKNSRFAWAEYHSDEKITPWNFDEIIDKEKSAEKFITRMTLNDLYLPEEKVLPKHSLVYETYTVYNELTKVKYVNEQGKSNFFDANMKQEIFEHVFKENRKVTKDKFLNYLNKEFPEYRIQDLIGLDKENKSFNASLGTYHDLKKILDKSFLDDKTNETIIEDIIQTLTLFEDRDMIRQRLQKYSDIFTPQQLKKLERRHYTGWGRLSYKLINGIRNKENGKSILDYLIDDGYANRNFMQLISDDTLPFKQIIKDAQIIGDIDDVTSVVRELPGSPAIKKGILQSVKIVDELVKVMGHNPDNIVIEMARENQTTNRGRNQSQQRLKKLQDSLKELGSNILNEEKPSYIEGKVENNHLQDDRLFLYYIQNGKDMYTGDELDIDHLSDYDIDHIIPQAFIKDDSIDNRVLTSSAKNRGKSDDVPSLDIVHDRKADWIRLYKSGLISKRKFDNLTKAERGGLTENDKAGFIKRQLVETRQITKHVAQILDSRFNTERDENDKVIRNVKVITLKSNLVSQFRKDFKFYKVREINDYHHAHDAYLNAVVGTALLKKYPKLAPEFVYGEYKKYDIRKFITSSGDKATAKYFFYSNLMNFFKRVIRYSNGKVVVRPVIECSKDTGEIAWNKQTDFEKVRRVLSYPQVNIVKKVETQTGGFSKESILPKGNSDKLIPRKTKKFRWDTPKYGGFDSPNIAYSVFVIADVEKGKAKKLKTVKELVGISIMERSSFEENPVVFLEKKGYQNVQEDNLIKLPKYSLFEFEGGRRRLLASASELQKGNEVVLSRHLVELLYHAHRVNSFNNSEHLKYVSEHKKEFGEVLSCVENFAKSYVDVEKNLGKIRAVADKIDTFSIEDISISFVNLLTLTALGAPADFNFLGEKIPRKRYTSTKECLNATLIHQSITGLYETRIDLSKLGEE

SEQ ID NO: 137 - protein, 1168 aa, Azospirillum sp.
MARPAFRAPRREHVNGWTPDPHRISKPFFILVSWHLLSRVVIDSSSGCFPGTSRDHTDKFAEWECAVQPYRLSFDLGTNSIGWGLLNLDRQGKPREIRALGSRIFSDGRDPQDKASLAVARRLARQMRRRRDRYLTRRTRLMGALVRFGLMPADPAARKRLEVAVDPYLARERATRERLEPFEIGRALFHLNQRRGYKPVRTATKPDEEAGKVKEAVERLEAAIAAAGAPTLGAWFAWRKTRGETLRARLAGKGKEAAYPFYPARRMLEAEFDTLWAEQARHHPDLLTAEAREILRHRIFHQRPLKPPPVGRCTLYPDDGRAPRALPSAQRLRLFQELASLRVIHLDLSERPLTPAERDRIVAFVQGRPPKAGRKPGKVQKSVPFEKLRGLLELPPGTGFSLESDKRPELLGDETGARIAPAFGPGWTALPLEEQDALVELLLTEAEPERAIAALTARWALDEATAAKLAGATLPDFHGRYGRRAVAELLPVLERETRGDPDGRVRPIRLDEAVKLLRGGKDHSDFSREGALLDALPYYGAVLERHVAFGTGNPADPEEKRVGRVANPTVHIALNQLRHLVNAILARHGRPEEIVIELARDLKRSAEDRRREDKRQADNQKRNEERKRLILSLGERPTPRNLLKLRLWEEQGPVENRRCPYSGETISMRMLLSEQVDIDHILPFSVSLDDSAANKVVCLREANRIKRNRSPWEAFGHDSERWAGILARAEALPKNKRWRFAPDALEKLEGEGGLRARHLNDTRHLSRLAVEYLRCVCPKVRVSPGRLTALLRRRWGIDAILAEADGPPPEVPAETLDPSPAEKNRADHRHHALDAVVIGCIDRSMVQRVQLAAASAEREAAAREDNIRRVLEGFKEEPWDGFRAELERRARTIVVSHRPEHGIGGALHKETAYGPVDPPEEGFNLVVRKPIDGLSKDEINSVRDPRLRRALIDRLAIRRRDANDPATALAKAAEDLAAQPASRGIRRVRVLKKESNPIRVEHGGNPSGPRSGGPFHKLLLAGEVHHVDVALRADGRRWVGHWVTLFEAHGGRGADGAAAPPRLGDGERFLMRLHKGDCLKLEHKGRVRVMQVVKLEPSSNSVVVVEPHQVKTDRSKHVKISCDQLRARGARRVTVDPLGRVRVHAPGARVGIGGDAGRTAMEPAEDIS

SEQ ID NO: 138 - protein, 1345 aa, Streptococcus mutans
MKKPYSIGLDIGTNSVGWAVVTDDYKVPAKKMKVLGNTDKSHIKKNLLGALLFDSGNTAADRRLKRTARRRYTRRRNRILYLQEIFAEEMSKVDDSFFHRLEDSFLVTEDKRGERHPIFGNLEEEVKYHENFPTIYHLRQYLADNPEKVDLRLVYLALAHIIKFRGHFLIEGKFDTRNNDVQRLFQEFLAVYDNTFENSSLQEQNVQVEEILTDKISKSAKKDRVLKLFPNEKSNGRFAEFLKLIVGNQADFKKHFELEEKAPLQFSKDTYEEELEVLLAQIGDNYAELFLSAKKLYDSILLSGILTVTDVSTKAPLSASMIQRYNEHQMDLAQLKQFIRQKLSDKYNEVFSDVSKDGYAGYIDGKTNQEAFYKYLKGLLNKIEGSGYFLDKIEREDFLRKQRTFDNGSIPHQIHLQEMRAIIRRQAEFYPFLADNQDRIEKILTFRIPYYVGPLARGKSDFAWLSRKSADKITPWNFDEIVDKESSAEAFINRMTNYDLYLPNQKVLPKHSLLYEKFTVYNELTKVKYKTEQGKTAFFDANMKQEIFDGVFKVYRKVTKDKLMDFLEKEFDEFRIVDLTGLDKENKAFNASYGTYHDLRKILDKDFLDNSKNEKILEDIVLTLTLFEDREMIRKRLENYSDLLTKEQVKKLERRHYTGWGRLSAELIHGIRNKESRKTILDYLIDDGNSNRNFMQLINDDALSFKEEIAKAQVIGETDNLNQVVSDIAGSPAIKKGILQSLKIVDELVKIMGHQPENIVVEMARENQFTNQGRRNSQQRLKGLTDSIKEFGSQILKEHPVKHSQLQNDRLFLYYLQNGRDMYTGEELDIDYLSQYDIDHIIPQAFIKDNSIDNRVLTSSKENRGKSDDVPSKNVVRKMKSYWSKLLSAKLITQRKFDNLTKAERGGLTDDDKAGFIKRQLVETRQITKHVARILDERFHTETDENNKKIRQVKIVTLKSNLVSNFRKEFELYKVREINDYHHAHDAYLNAVIGKALLGVYPQLEPEFVYGDYPHFHGHKENKATAKKFFYSNIMNFFKKDDVRTDKNGEIIWKKDEHISNIKKVLSYPQVNIVKKVEEQTGGFSKESILPKGNSDKLIPRKTKKFYWDTKKYGGFDSPIVAYSILVIADIEKGKSKKLKTVKALVGVTIMEKMTFERDPVAFLERKGYRNVQEENIIKLPKYSLFKLENGRKRLLASARELQKGNEIVLPNHLGTLLYHAKNIHKVDEPKHLDYVDKHKDEFKELLDVVSNFSKKYTLAEGNLEKIKELYAQNNGEDLKELASSFINLLTFTAIGAPATFKFFDKNIDRKRYTSTTEILNATLIHQSITGLYETRIDLSKLGGD

SEQ ID NO: 139 - protein, 1024 aa, Helicobacter mustelae
MIRTLGIDIGIASIGWAVIEGEYTDKGLENKEIVASGVRVFTKAENPKNKESLALPRTLARSARRRNARKKGRIQQVKHYLSKALGLDLECFVQGEKLATLFQTSKDFLSPWELRERALYRVLDKEELARVILHIAKRRGYDDITYGVEDNDSGKIKKAIAENSKRIKEEQCKTIGEMMYKLYFQKSLNVRNKKESYNRCVGRSELREELKTIFQIQQELKSPWVNEELIYKLLGNPDAQSKQEREGLIFYQRPLKGFGDKIGKCSHIKKGENSPYRACKHAPSAEEFVALTKSINFLKNLTNRHGLCFSQEDMCVYLGKILQEAQKNEKGLTYSKLKLLLDLPSDFEFLGLDYSGKNPEKAVFLSLPSTFKLNKITQDRKTQDKIANILGANKDWEAILKELESLQLSKEQIQTIKDAKLNFSKHINLSLEALYHLLPLMREGKRYDEGVEILQERGIFSKPQPKNRQLLPPLSELAKEESYFDIPNPVLRRALSEFRKVVNALLEKYGGFHYFHIELTRDVCKAKSARMQLEKINKKNKSENDAASQLLEVLGLPNTYNNRLKCKLWKQQEEYCLYSGEKITIDHLKDQRALQIDHAFPLSRSLDDSQSNKVLCLTSSNQEKSNKTPYEWLGSDEKKWDMYVGRVYSSNFSPSKKRKLTQKNFKERNEEDFLARNLVDTGYIGRVTKEYIKHSLSFLPLPDGKKEHIRIISGSMTSTMRSFWGVQEKNRDHHLHHAQDAIIIACIEPSMIQKYTTYLKDKETHRLKSHQKAQILREGDHKLSLRWPMSNFKDKIQESIQNIIPSHHVSHKVTGELHQETVRTKEFYYQAFGGEEGVKKALKFGKIREINQGIVDNGAMVRVDIFKSKDKGKFYAVPIYTYDFAIGKLPNKAIVQGKKNGIIKDWLEMDENYEFCFSLFKNDCIKIQTKEMQEAVLAIYKSTNSAKATIELEHLSKYALKNEDEEKMFTDTDKEKNKTMTRESCGIQGLKVFQKVKLSVLGEVLEHKPRNRQNIALKTTPKHV

SEQ ID NO: 140 - protein, 765 aa, Butyrivibrio fibrisolvens
MGITIGLDLGVASVGWAVVNDDYEILESCSNIFPSADASKNSERRGFRQGRRLTRRRKNRIHDFQKLWEDKGFVIPSQGTEDVLAIKIKGLSEKLSVDEVYWVLLNSLKHRGISYLDDADSGDNSSDYAKSISRNEEELKEKLPCEIQWERLQKYGAYRGNISIVEDGEPITLRNVFTTSAYKKEVEQFIDTQAKYNAQYSGDFKADYLEIFNRKREYYEGPGNELSRTDYGKYTTEINADGEYITVDNIFDKLVGKCSVNPDERRAAGASYTAQEFNVLNDLNNLTISSESSFIEDGKLTEDAKRKIIETIKNAKTVNVKKIICDVIGDKKCQISGARIDKNEKEIFHSFEAYNKMRRALEEIGFDISSLSRENLDLIGDILTLNTDRESILNAFNRKGIELADEAKDILVKVRKTNGSLFNKWQSFGLSIMNELIPELYAQPKNQMELLTAMGVFKSRGDRFLECKEIPGDLIVDDIYNPVVSKTVRITVRILNALIKKYGYPDRVVIEMPRDKNSDEEQQRLKKEQRDNENEIKDIKARVKTEYGREITEEDFRQHSKLSLKLKLWNEQQGICPYSGKSIKIDDLLDNPNLFEVDHIIPLSISFDDSRNNKVLVYSSENQDKGNRTPLAYLASVNRQWDIHSFMDYVLKTYAGAQKRKKRDNLLNEQDITKVEVLQGFVNRNINDTRYASKVVLNSLQEYFSSKECSTKVKVIRGSFTHQMRVNLKLKKTVMNHMFIMQLMQCLLLFHRWDMTLIMNLQISI

SEQ ID NO: 141 - protein, 1338 aa, Coprococcus catus
MKQEYFLGLDMGTGSLGWAVTDSTYQVMRKHGKALWGTRLFESASTAEERRMFRTARRRLDRRNWRIQVLQEIFSEEISKVDPGFFLRMKESKYYPEDKRDAEGNCPELPYALFVDDNYTDKNYHKDYPTIYHLRKMLMETTEIPDIRLVYLVLHHMMKHRGHFLLSGDISQIKEFKSTFEQLIQNIQDEELEWHISLDDAAIQFVEHVLKDRNLTRSTKKSRLIKQLNAKSACEKAILNLLSGGTVKLSDIFNNKELDESERPKVSFADSGYDDYIGIVEAELAEQYYIIASAKAVYDWSVLVEILGNSVSISEAKIKVYQKHQADLKTLKKIVRQYMTKEDYKRVFVDTEEKLNNYSAYIGMTKKNGKKVDLKSKQCTQADFYDFLKKNVIKVIDHKEITQEIESEIEKENFLPKQVTKDNGVIPYQVHDYELKKILDNLGTRMPFIKENAEKIQQLFEFRIPYYVGPLNRVDDGKDGKFTWSVRKSDARIYPWNFTEVIDVEASAEKFIRRMTNKCTYLVGEDVLPKDSLVYSKFMVLNELNNLRLNGEKISVELKQRIYEELFCKYRKVTRKKLERYLVIEGIAKKGVEITGIDGDFKASLTAYHDFKERLTDVQLSQRAKEAIVLNVVLFGDDKKLLKQRLSKMYPNLTTGQLKGICSLSYQGWGRLSKTFLEEITVPAPGTGEVWNIMTALWQTNDNLMQLLSRNYGFTNEVEEFNTLKKETDLSYKTVDELYVSPAVKRQIWQTLKVVKEIQKVMGNAPKRVFVEMAREKQEGKRSDSRKKQLVELYRACKNEERDWITELNAQSDQQLRSDKLFLYYIQKGRCMYSGETIQLDELWDNTKYDIDHIYPQSKTMDDSLNNRVLVKKNYNAIKSDTYPLSLDIQKKMMSFWKMLQQQGFITKEKYVRLVRSDELSADELAGFIERQIVETRQSTKAVATILKEALPDTEIVYVKAGNVSNFRQTYELLKVREMNDLHHAKDAYLNIVVGNAYFVKFTKNAAWFIRNNPGRSYNLKRMFEFDIERSGEIAWKAGNKGSIVTVKKVMQKNNILVTRKAYEVKGGLFDQQIMKKGKGQVPIKGNDERLADIEKYGGYNKAAGTYFMLVKSLDKKGKEIRTIEFVPLYLKNQIEINHESAIQYLAQERGLNSPEILLSKIKIDTLFKVDGFKMWLSGRTGNQLIFKGANQLILSHQEAAILKGVVKYVNRKNENKDAKLSERDGMTEEKLLQLYDTFLDKLSNTVYSIRLSAQIKTLTEKRAKFIGLSNEDQCIVLNEILHMFQCQSGSANLKLIGGPGSAGILVMNNNITACKQISVINQSPTGIYEKEIDLIKL

SEQ ID NO: 142 - protein, 1035 aa, Candidatus Puniceispirillum
MRRLGLDLGTNSIGWCLLDLGDDGEPVSIFRTGARIFSDGRDPKSLGSLKATRREARLTRRRRDRFIQRQKNLINALVKYGLMPADEIQRQALAYKDPYPIRKKALDEAIDPYEMGRAIFHINQRRGFKSNRKSADNEAGVVKQSIADLEMKLGEAGARTIGEFLADRQATNDTVRARRLSGTNALYEFYPDRYMLEQEFDTLWAKQAAFNPSLYIEAARERLKEIVFFQRKLKPQEVGRCIFLSDEDRISKALPSFQRFRIYQELSNLAWIDHDGVAHRITASLALRDHLFDELEHKKKLTFKAMRAILRKQGVVDYPVGFNLESDNRDHLIGNLTSCIMRDAKKMIGSAWDRLDEEEQDSFILMLQDDQKGDDEVRSILTQQYGLSDDVAEDCLDVRLPDGHGSLSKKAIDRILPVLRDQGLIYYDAVKEAGLGEANLYDPYAALSDKLDYYGKALAGHVMGASGKFEDSDEKRYGTISNPTVHIALNQVRAVVNELIRLHGKPDEVVIEIGRDLPMGADGKRELERFQKEGRAKNERARDELKKLGHIDSRESRQKFQLWEQLAKEPVDRCCPFTGKMMSISDLFSDKVEIEHLLPFSLTLDDSMANKTVCFRQANRDKGNRAPFDAFGNSPAGYDWQEILGRSQNLPYAKRWRFLPDAMKRFEADGGFLERQLNDTRYISRYTTEYISTIIPKNKIWVVTGRLTSLLRGFWGLNSILRGHNTDDGTPAKKSRDDHRHHAIDAIVVGMTSRGLLQKVSKAARRSEDLDLTRLFEGRIDPWDGFRDEVKKHIDAIIVSHRPRKKSQGALHNDTAYGIVEHAENGASTVVHRVPITSLGKQSDIEKVRDPLIKSALLNETAGLSGKSFENAVQKWCADNSIKSLRIVETVSIIPITDKEGVAYKGYKGDGNAYMDIYQDPTSSKWKGEIVSRFDANQKGFIPSWQSQFPTARLIMRLRINDLLKLQDGEIEEIYRVQRLSGSKILMAPHTEANVDARDRDKNDTFKLTSKSPGKLQSASARKVHISPTGLIREG

SEQ ID NO: 143 - protein, 1270 aa, Mycoplasma gallisepticum
MNNSIKSKPEVTIGLDLGVGSVGWAIVDNETNIIHHLGSRLFSQAKTAEDRRSFRGVRRLIRRRKYKLKRFVNLIWKYNSYFGFKNKEDILNNYQEQQKLHNTVLNLKLEALNAKIDPKALSWILHDYLKNRGHFYEDNRDFNVYPTEELANYFDEFGYYKGIIDSKNDDDDKLEEGLTKYKFSNQHWLEEVKKVLSNQTGLPEKFKEEYESLFSYVRNYSEGPGSINSVSPYGIYHLDEKEGKVVQKYNNIWDKTIGKCSIFPDEYRAPKNSPIAMIFNEINELSTIRSYSIYLTGWFINQEFKKAYLNKLLDLLIKTNSEKPIDARQFKKLREETIAESIGKETLKDVESEEKLEKDDHKWKLKGLKLNTNGKIQYNDLSSLAKFVHKLKQHLKLDFLLEDQYTPLDKINFLQSLYVYLGKHLRYSNRVDSANLKEFSDSSRLFERVLQEQKDGLFKLFEQTDKDDEKILTQTHSLSTKAMLLAITRMTNLDNDEDNQKNNDKGWNFEAIKNFDQKFIDITKTNNNLSLKQDKRYLDDQFINDAILSPGVKRILREATKVFNAILKQFSEEYDVTKVVIELARELSEEKELENTKNYKKLIKKNGDKISEGLKALGIAEDKIEEILKSPTKSYKVLLWLQQDHIDPYSQKEIAFDDILTKTEKTEIDHIIPYSISFDDSSSNKLLVLAESNQAKSNQTPYEFINSGKAEITWEVYEAYCHKFKNGDSSLLDSTQRSKKFAKMMKTDTSSKYDIGFLARNLNDTRYATIVFRDALKDYANNHLVEDKPMFKVVCINGGVTSFLRKNFDPKSWYAKKDRDKNIHHAVDASIISIFSNETKTLFNQLTKFADYKLFKNTDGSWKKIDPKTGVVSEVTDENWKQIRVRNQVSEIAKVIDKYIQDSNIERKARYSRKIENKTNISLFNDTVYSAKKVGYEDQIKRKNLKTLDIHESAEENKNSKVKKQFVYRKLVNVSLLNNDKLADLFAEKEDILMYRANPWVINLAEQIFNEYTENKKIKSQNVFEKYMLDLTKEFPEKFSEAFVKSMIRNKTAIIYNVEKDVVHRIKRLKILSSELKENKWSNVIIRSKNESGTKLSYQDTINSIALMIMRSIDPTAKKQYIRVPLNTLNLHLGDQDFDLHNIDAYLKKPKFVKYLKANEIGDEYKPWRVLTSGTLLIHKKDKKLMYISSFQNLNDLIEIKNLIETEYKENVDSDPKKKKKASQILRSLSVILNDYILLDAKYNFDILGLSKNKIDEILNSKLDLDKIAK

SEQ ID NO: 144 - protein, 1204 aa, Prevotella ruminicola
MERILGIDTGTNSLGWAIVDKDENQYHLVAKGTNIFSEGVKIEKGIESSKAAERTEHRSVRKHYWRRKIRKIRLLTILSDNDLCPRLKHEQLRQWRLKKVYPTDDTFMEWQRTEDKAQVNPYKFRYICLTQKLDLSDITQRFILGRALYHLNQRRGFLSNRKEATKESEGTVKEGISSLSKDMKDSGCEYLGEYFYQLYQQGKKIRNHYTARKEHYLKEFKAICSKQELDDALIEKLEKAIFDQRPLKSQKGQVGTCTFEKGKSRCPSSHPLYEDFRMYSFINNIKVQVDTLYDKGERSLTDEEKQLIIPLFKRKSKRTFPFEDIAKKIAGKNNYCYIKSNEEKAYKFNYQMDTQVSGSPVNAQLEEIFGEDWLSSVCEVYTLANNKSRFQIMNDVWHVLFFYDDEDKLKEFAKDRLQLDDELAEKFSKISIPNDYAALSLKAIRKIMPYLRDYGLIYSEAVFLANLVDVLPQHVWGIKEMREAAIENVIDVMHSYDKNNIDGITLEGCVKTFLKERYQVSDDNLKKLYHPSMLDPYPRQRPNDEGVFQLGSPRISSVKNPMAMHSLFRLRKVVNLMLKKGYITPDTKVHIEFSRDLNDANKRWAIQTWQRENEKERERCRKEIEKYIASPSDTDILKYQLWEEQNHKCLYTGDEIRITDFLGDNPKYDIEHTIPRSAGGDSTKMNLTLCSSRFNRDEKKTKLPAELVNHDEILERISNWKEKYEDIDKQIRKISTKGATSKEDKDSKIRRRHYLILQRDYWRGKYQRFTMTEVPEGFSRRQGTDISVISRYARMYLKSVFKQVYIVKGIATSDFRKMWGIQDEYAKKERVNHVHHCIDAITIACIGKAEYDKLADYRHQYDDYLFQGKTKPTFDKPWPSFVIDIKHIQDELLIAHYAKDNLEKFTKKNLRGKDGRIIRDKFGNKLQMKGDTSRNSLHNDKFYGAINHEGEIKYVYRTNIEALDAKSIGNIVDPTVRSIIESAIAIHGSLKAAINKGIWMNEEKHIPIKKVRVFRNDVKKPIELKDQRDLSDKDYKQHYYVTNDGNYMMLIFSKLNNKGREIRQHVVINSLEATEVIKSHKRSQVGKVVWESYYSKEGFDLIYKLKSGTMILLYENNRDEVWDLDIRNLQKRLYIITKMKYDGRIYMMHHQEAREKKDLEEKSGSFKINEDYRPLIVNSYNQFNALVQDLDFEINDLGEIRRLI

SEQ ID NO: 145 - protein, 1178 aa, Scardovia inopinata
MGKRHNSNMAKKKISYRIGIDVGLNSTGLAAIEVDDDGAPIRILNTMSVIHDGGVDPDAAKVRGTRLAISGIARRTRRMRRRRAKRLDRLEQILEKYGYTDTEPVLEEPYGPWICRAELADGFINDDEQRRMMIGIAIRHIARHRGWRNPYQNVRALLNIDDSDLSEEYKNLKEKVQDQINDGKDLPNFTPSQLVRDYLDNFSGQPAARIRTGKAGPRGNRRDAVGILPQRMRQSDYAYELQRIFDMQKIGRDEAQELLMAVFEAKSPKGSAEKRIGKDPLTGKKRALKASLAFQKYRIVATITNLRIKTGTGSERMLSPTELNDIYTYLLRVQDDNHLPTWEDICEEVLHIGRYQLAGIGKTFEGGERISNMPPVIQTSLAIHGLSEGTLAEKLTKWWDKADDDSRESMIKLLSNTVDIDRVNEVDENFASALDFIDSLDDEELTKLDKIALPRGRAAYSEEALNKLTADMLNTGDDLFSARQRIYHVNNSWRPPQPPIGEPLGNPAVDRVLKITNRYLMNCLNRWGQPRRVTIEHTRSGFTSVKQATEHQKISDKRAEYRRDIVKQLEEAGVESVHEYDIRRWEAVQRQNGQCLYCGRDITFKTCEMDHIVPRKGPGSTNTRTNFAAVCPECNRMKSNIPFASWAETKEAKDRGVSLDKAIKQVRFFNFTKNEYSPQAQRNFKKSMIERLKQKTSDEPLDNRSIESVSWMADELYKRIDWYFNHEQYETSKKAINDDKDNLSGTQVVVYPGSITAEARNAAGLGGNIHFIGGRYKTRLDRRHHAVDACVIAMMEPGIARILTERNQLRQAQRLTARIEDDEVNWKDYPTENTAGYNKYQAWSDRMHALLEYMNNALDYDKIPVVRWERLQLGNRSAHEDTIHPLKKLPLSHEISAIDINHASTPALYEALVSLPDFSEQDGLPADPSRQINVNGERYSGDDLVSFFNSNAAQIAIQGGSAELGTAFHHARIYRCWTVGKNGKKKIFFGMIRVYQHDLLHAKNEDLFTYPLKRSSVSMRYAKKEVVHAILSGNAEYVGYLCVGDELVLDLKGDKSNDEGGSRLSGQVGEFVQKFEEDSKVNSQIVNRWTVDGFPDEAKLRLRPSMFAGEGLKNMKSELVENAAIKNILSKTGWRVSVDVISKKSPVVLRRNAFGEPRWKTNAGLPVSYRWQDTETKE

SEQ ID NO: 146 - protein, 1371 aa, Gordonibacter pamelaeae
MNLRNVESYQVGLDIGTGSVGWAVLDDNGDLCRFKGKPTWGSRVFPTAETAAEARVHRGQRRRYDRRRQRIDLLQRFFADEVAKVDPEFFIRLNQARLHPENRDPAHADYRWPLFNGSNFTEKDYYRQFPTIYHLRAHLLKSDEPADIRLVYLALHNIVKHRGNFLHQDNPSLSARNANVGDAVEALCLALDEWCGAHDVECACDEAALAEALGDASLRPGEKRERAEAALGVEKAHKKLAKAVSSAVVGYAAEFGHVFFAESEGSKFALSNDEKVEAYVCPDEGRDLFDAMRAVHSSYVLMGILSEAQGELLSVCKVGEYERYKRDLETLKSLVRAYGPERYDEFFCGPFYEGTRDYDPGKAQGYTKYNLGASKLSHEDFLKEVQKLLKDIGAQADERYADIERAIEAGAFLRRLKTSDNGTIPYQLHLEEMDAIIERQAAFYPFLAQEKDKLKSLVSFRIPYYVGPLTQKNAARDGKGEARFAWSSRKPGMEDARVYPWNWEDVIDKDQSAEDFIRRMTGTCTYLKGEPVLARCSLDYELFCVLNELAGARWTQDGDKSYRFDAADRLGIVEDLFKKRKRVTYEAAEKWLARTHGPESGKSAGGAYHVSGGQGEDAFESQLSSHYDFCKILGVDELSDADEAMAEDIILWNTVFEDRSILKRKIKLAYGDRLGDAQVRKLCQKRYTGWGRLSGELLRGLRSATDNGPKTIMDILLEGDPNHARRMGAAMNLMEILHDDLLEFQAKIDEHNRERALAVGGMSVDEVTGSPALRRGINQALRVVDEIAGIAGKPPAHIYVEVTRDEGARNKGRRTTSRYRALEAALSSIKAQCADVYAELKERDPRALDDERLTLYFMQCGKCMYSGDALDINKLQTYQVDHILPQSYVKDDSFENKVLVRPDTNQRKGDTLLLDERLIARMRGFWRTLRDAELIGEKKFNNLTRTSVSDEQMKKFVSRQLVETGQMVKQVQQLLQARYPESEVQPVKAGVSHQLRVGCALAKSREINDFHHAHDAYLACQVGRFVQYRHSAVYSEPVKMAAVVKQFIKKQAEDYRRTRELPGSDGFIVSSFMTPGFDVKTGEVFRDAWDAGAEIDRIRRCFDYKDCFISRMPEETHGAFWDATIYSPRAAGKTLSLPLKRGLDPRKYGSYSREQFAYFFVYEAVKPKKKQRVLEFAPVPVRVASALANDPDALEDYARELAEAEGLVFERIRRRKVYKYQQIIVGDSRLYVTGREEVRNARQLAFSQDETKLICRIEQGEECEEGELLDLFRSMQRKYLACAPRLARLMKVAEMEEGFIAATASGKREVLLSLTSIAAAHRNSIDLKPIGRKGSSGQMKITFSKELSTNGILFVDSSVTGMFERRCRLGL

SEQ ID NO: 147 - protein, 1388 aa, Zunongwangia profunda
MKRILGLDLGTNSIGWALVNEAENEKEISKIIKLGVRVNPLTIDEKTNFEKGRPLSTNADRTLKRGARRNLQRYKLRRENLIEILIDNHIITKETPLTEIGKGTTYQTLSLRAKAVRERIDLEDFAKVLLAINKKRGYKSSRKASNDEEGQAIDGMAIAKELYERGITPGQYVLELLENDRKYIPDFYRSDLKQEFNKIWNNQKTFYPEILTDELFKELDGKNKSQTWAICQKPFNIKGIKRITKGREKTIENYHWRVKGLSGKLNLEKLAIILQEINNDINQSSGYLGGISDKSKKLYLNKETVGEFLYKQIAKNPHTSLKNQVFYRHDYLDEFEQIWKTQSNFNANLTDELKQEIRDVIIFYQRKIKSQKSLISFCQFESWEQEYFDKETGKTKTRTVGRRVIPKSSPLFQEFKIWQNLNHLVFTNSETDEKIEIKEVEQEIRKELFEELNLRGDLNPNDLLKILRSQFKIGKLSNWKCNFEKIEGNRTNAALFNIYQKISDFEGYGIDWNKSNAKKIRKELKATFPEIGIDASILEFDAYKKQLTNQSSYELWHLLYSAEEDFKISEQDKLIYGNSSVSLKKKLHLKFGFNPEYAKMLANLSLMSDYGNLSAKAIKKILPYLEDGHLYSEACRLAGYNHSKSLTAEELEKFEPKAKLDLLKKNSLRNPVVEKILNQMVNVVNQVIDTYGKPDGVRIELARELKKSAKERAEMTKGIADGTRRNEEIKKIITQKFGIPNPTKSDLVRYRLWQELESRGYKDIFTDKYISPDKIFSSEIDIEHIIPKALLFDDSFSNKTLSFRNVNLKKANRTALDFITQDYQSNVEAYKERVETWNKDNHISKGKRNKLLMSLKDIPDGFIERDLRNSQYIARKAKRMLYEVFPNEVLATSGSITDKLRSDWDLINVMKELNLPKYKALGLTEYEERLDKGTEELFKHEVIKDWTKRNDHRHHAMDALAVAFTTHNHIQYINNLNARKDITQDNHPIIKNIENLITEVNSKGKRVFKAPMSSFRESAKEQIEAILVSFKNKNKVVTKNINQTKKEGGFNYQNAKTPRGQLHKETIYGKSKQPLEKPVKINNRFCKKQVGLIINFKEQEAVLHHLKKYDNNEKIAFSNKTLKSDPIQVNGSPLREVKIFEEIFTIRKDINPDNFKTQKHLDKIIDKGIKEVMKKRLEEYNGDFKTAFSDLDKNPIWLNQSKGITIKRATISGVTNAEPLHQAKDHLGNIILDDNGKEIPIDYVSTGNNHHVAIYQDESGNLQEEVVSFYEAVIRKNQDQPIIKKRHPKGWKFLFTMKQNEMFVFSSENFNPSEIDLLDEKNAAIISPNLFRVQKIATKNYMFRHHLETEVTNNLDFTYRHFQATEWLRNLCKVRIDHIGRIVQIGEY

SEQ ID NO: 148 - protein, 1082 aa, Methylosinus trichosporium
MRVLGLDAGIASLGWALIEIEESNRGELSQGTIIGAGTWMFDAPEEKTQAGAKLKSEQRRTFRGQRRVVRRRRQRMNEVRRILHSHGLLPSSDRDALKQPGLDPWRIRAEALDRLLGPVELAVALGHIARHRGFKSNSKGAKTNDPADDTSKMKRAVNETREKLARFGSAAKMLVEDESFVLRQTPTKNGASEIVRRFRNREGDYSRSLLRDDLAAEMRALFTAQARFQSAIATADLQTAFTKAAFFQRPLQDSEKLVGPCPFEVDEKRAPKRGYSFELFRFLSRLNHVTLRDGKQERTLTRDELALAAADFGAAAKVSFTALRKKLKLPETTVFVGVKADEESKLDVVARSGKAAEGTARLRSVIVDALGELAWGALLCSPEKLDKIAEVISFRSDIGRISEGLAQAGCNAPLVDALTAAASDGRFDPFTGAGHISSKAARNILSGLRQGMTYDKACCAADYDHTASRERGAFDVGGHGREALKRILQEERISRELVGSPTARKALIESIKQVKAIVERYGVPDRIHVELARDVGKSIEEREEITRGIEKRNRQKDKLRGLFEKEVGRPPQDGARGKEELLRFELWSEQMGRCLYTDDYISPSQLVATDDAVQVDHILPWSRFADDSYANKTLCMAKANQDKKGRTPYEWFKAEKTDTEWDAFIVRVEALADMKGFKKRNYKLRNAEEAAAKFRNRNLNDTRWACRLLAEALKQLYPKGEKDKDGKERRRVFSRPGALTDRLRRAWGLQWMKKSTKGDRIPDDRHHALDAIVIAATTESLLQRATREVQEIEDKGLHYDLVKNVTPPWPGFREQAVEAVEKVFVARAERRRARGKAHDATIRHIAVREGEQRVYERRKVAELKLADLDRVKDAERNARLIEKLRNWIEAGSPKDDPPLSPKGDPIFKVRLVTKSKVNIALDTGNPKRPGTVDRGEMARVDVFRKASKKGKYEYYLVPIYPHDIATMKTPPIRAVQAYKPEDEWPEMDSSYEFCWSLVPMTYLQVISSKGEIFEGYYRGMNRSVGAIQLSAHSNSSDVVQGIGARTLTEFKKFNVDRFGRKHEVERELRTWRGETWRGKAYI

SEQ ID NO: 149 - protein, 1186 aa, Gardnerella vaginalis
MEGNISYAIGIDVGLNSVGLAAIRLDNNGEPIRILKAMSVIHDAGIDPNGAKESDTRKAISGVARRVRRLYRQRRRRLQKLDFLLHSLGFPVVENKDLDFSDSFTPWIFRAKLADEYIADEKQRKQMLSVAIRHIARHRGWRNPYQSIKSMTQETEYSEFYNELLKNIEKFAPGVSCEGSTPAQLVRDYLLSQQGKASRRLRITTDDRRKNHPNSLDPVLPRKLMQSDNMLEILNIFNVQHIDNKYVREQIINAVFYAKSPRGSAENRVGKDAITGKGKRALKASLAFQKYRIISTISNLRIRENSKERCLTIEEKQSVYKLLTTSTDEYSKEKSAEAPLYTWIDVADCLGIERYKLRGVGSQIEDGESVGNRPPMLNSELAILYANAKSLKQSLITWWLAANRTQEDKEAFIEILSNTVDIEAIHDNPEYQDKYGSVIAFIDSMDETEIAALENISLPNGRAAYSLETLDKLNKQMLETDDDLFEARKKLFNLPNNWRPSEAPIAEPTGNPSVDRVLKIVHRFLISAKNRWGNPERINIEHVRSGFQSKKMANSYKKLLDKRTEGKENLKAMMRNSLHLGTSDSISDADIRRYEAVQRQNGQCLYCGSEITYHTCELDHIVPRKGPGSTNTRENLVATCSSCNAQKCNTPFATWCEESTYCKNHDISVDSAINRVRAFIFPPNSYDKRGASQFKKEVIARLKQKVGDEAFDNRSIESVAWMANELHRRIDWYYNSQNYQTNNGISDITNKAQTNVGVYAGSLTAIARRMSGIDGKLEFFDGRRKTRFDRRHHAVDASVIAMMTPGIAQILAIKCNLRETQLLQGNKVVPGGIDWKEYPTANDQGYQQYANWSVRMNALLELLNEEMRADRIAVVNSIRLRYSNSSVHKDDVHALLKLHVGDEIDSETIRRASTPALYCALTRNPDYDVNNGLPENTDRTILLHDKKLNADDSITFFKSKAAQLFVREGSVEIGNSIHHLRIYEYFEKLKSGKVKKSYGMIRVFQDDLHRYIHEDLFSCDLPEQSISMRYADTKVAHAVQTGNANYLGYLVPGDEIIVDFSHVKLSGYIGEFVEFLNKIGANCAAYKHWVVAGTDDKTTLILKPSMISSEGIDKLYSNCERNNFDYASYEKSIDKILVDKGWRVSVNVLDQYKAATIRRNALGEPRWASRSHLPISWSWDTGENRE

SEQ ID NO: 150 - protein, 1434 aa, Bacteroidetes oral
MKNILGLDLGTNSIGWAYVKQAQNDSEKSEIAELGVRVNPLTVDEKTNFEKGKPISTNADRTLKRGARRNLQRYKLRRQELIELLKDYQVISDKTILAEDGKETTFETLRLRVKSAKEQVSLEELARILLMINKKRGYKSSRKAKNEDEGQLIDGMEIARRLYDENLTTGQLSLQLLKEGKKSLPDYYRSDLQHELDKVWNFQKQFHPDILTDEFYTSIQGKGQKATRESFSSKYGIDTAENKGSREEKKLQAYQWRADATHKELTKEELAFVITEINNNINNSSGYLGAISDRSKELIFANETVGEYLWKQIQNDPHTSLKNQVFYRQDYFDEFERIWETQSGFYPQILTESLKNELRDILIFYQRKLKSQKALVSICEFESKEIPLKDKQGNPISKNGIPVTKLVGPKVAPKSSPLFQEFKIWQNLNNVLVRPKGSRKRKVTTNQQSTLLEGQEPVFELNLEQKELLFEELNLKGNLKTDYCLELIGYSAKEWEMNYPTLEGNKTNKALYEAYLKIIDSEGYDAKKLLKVKTDKDDINLDDIKVSASEIKTMISDIFNELGINTKILDFDAELERKQFEAQASYRLWHLLYSYEGDDSKSGNELLYRLLEDKFGFKREHSKTLANVSLLSDYGNLSTKAIRTIYPYIKENKFSTACELAGYRHSKLSISKEENENRTLKDTLDVLKKNSLRQPVVEKILNQMINLINELIEKHSEKDEKGNIVKYFKFDEIHIELARELKKNAEERRELDSKVREGKDRNEKIITILKSEFGLPYPTKNDITRYRLYEELKDNGYKDLYTNTYIPREKLFSKEIDIEHIIPKSRLFNDSFSNKTICYRQDNLNKGERTAYDYIEGLGKTQLDEYLNRVENLYTNKFITKAKYRNLLKKESEIGDGFIERDLRETQYIAKKAKEMLLQITRHVVSTTGSITDRLRDDWELVNVMRELNLPKYKVLGLTEIQERKNGQTVEVITDWTKRNDHRHHAMDALTVAFTKHSHIQYLNFLNARKDEKHKEYSNIMGIQQLETEKTTDKDGKDRRVFKTPIPNFRQVAKEHLESILISHKTKNKVVTRATNKIAGSKKQQETLSPRGQLHKETVYGKYRRYVQKEEKIGSKFDLQTIERVANPLYKRLLTKRLEENGGDPKKAFTGKNALAKSPIYLDETQTQQLPEKVKLVWLETDFSIRKDITPDNFKDEKSIDKVLDEGIKRILKDRLKSFDGDAKRAFTDLEQNPIWLNKEKGIAIKRVTISGVSNAEPLHTKKDHLGNEIFDDTGKPIPVDYVSTGNNHHIAIYRDENGNLQEKAVSFFEAVTRANQGLPTVDKTYNQHLGWQFLFTMKQNEMFVFPNKETGFDPQEIDLLDPKNKKLISPNLFRVQKISTKNYFFRHHLETSVETHNALNGVTYKSQLGLNGITDIIKVRINHLGDIVHIGEY

SEQ ID NO: 151 - protein, 1341 aa, Peptoniphilus sp.
MWGSRLFEEASTAQDRREHRSNRRRLERRKYRLDLLEELFVEEINKIDPEFFIRLRESKFHFEDRSLKNTFILFNDKMEGGYNDKVFFSKYPTIYHLRSALINGNKEDVRAVFLAIHNILKNRGHFLLAGNDINISLSLNDTLTDLFEYLKIHLGIEVEFENKLKDIEKIALDKNLSKSDKQKKIVQLLETDYKKQLADVFKLSLGLTANMENIFGKENEQGLEFINAENKIKKIQFDSSYEENIAEFDQFYGEYFEIIDICKKIYDAISLSQILVDGKGLSESKVLSYEKHKEDLKLLKKVLKNIDKAYDNKGEDRLVYKVLKEDKDKGTNYVNYSKLSNNGTATTKEEFYKFLSKNLDLKKFGKLNKEDIETLDYINSEILLGRFLPLQKEKINGVIPYQLQMKELTQILNNASKYLPFLNKIEDGMTVKDKIISLIKFRIPYYVGPLNEYNRIENGNGFAWIEKKKNEKIFPWNFNDVVDIEKSAEKFINNLTNKCTYIKEETVLPKNSIIYSKFMVLNELNNLQYGNKKLDIELKMKMYTDLFLEKKDNRKVTEKRILEYFRINGINDGKEKLTGLNNEIHADMKSYRDMCEIMGENFNINVAENIINWITVFHGEKKILINKIKNVYGKMFNDEQISKLSKLNYSDWGRLSKKLLTDIKCYIDADGINFPVSILEAMEVSNKNLMELLSNKYEFISCIDDINNKYFGDRDISASELIDELYVSPAVKRGIWQSVRILEEIVSIIGHNPKKIFIEMTRHNEEKVQKSSRRHNLEELYKAIRKDPEYVELIKEFDSTTDTDSFKIKKLYLYFMQLGKCAYSKEKIDFDKLFTDSYDIDHIYPRSKTKDDSIHNNLVLVKAKYNREKTDVYPIDINIQKNMNSFWNFLYTKKFITEEKYKRLIRTSDLTDEELAKFISRQLVETSQSTKATAEVLKQIYGDSDICYVKAENVSDFRYGSSRQKDKNDIQKLFVKCREVNHFHHAKDAYLNIVVGNVYDVKFTKNPVNFIKKNKMGNKSNYSLNHMFCFDVERNGYKAWDSSETIKTVGRMMKSNDVRITKHVHPTRGELYDATIYKAKIAKTGSYMPLKSSKNTPLSDVTKYGGYTKIKIAYYSVYKYKFSDKNLIKTEIRLIPIPIYLSKNDDDIKEYVKNYLNDRVNSKLIDFTKIYDKLYVNSLIKINGYLYYLGGKTNDRVWIDNAVSIVLDDKIEYLIKRISNDIKYGYEINVSDDELMDIYESLAEKANKKIFYNRLSDFEKIFSNMDVKKKFVKLEKNDKCRVLLQLLNVLTDSQTTYKLEMVGLKHSRSNIGMKISNLEEFKVINSSITGLYSNEIDILNI

SEQ ID NO: 152 - protein, 1391 aa, Lactobacillus gasseri
MTKIKNEYIVGLDVGTNSCGWVAMDFQNTILRMHGKTAIGSHLFDAGNSAADRRAFRTTRRRIKRRKWRLKLLEEIFDPYMTEVDPYFFARLKESGLSPLDKRKNVSSIVFPTALEDKKFYCNYPTIYHLRYDLMSEDKKFDLREIYLAIHHIVKYRGNFLYNTPVKDFEASKIDVKDSLEKLNELYERLDSEFTVELDSSNALEIEKIIRDKKVFKINKVKSIHQLLSLKTENKERTKLIKDVSKQIINAILGYKTKFETILLKNISKDEADDWEFKLTDVDADNKFENLIGDLNENEQEILLEIRNLANAITLSNIVEEGKTLSESMIDKYNKHSDDLELLKQVISDHPDRDKAKKLALAYDLYVNNRHGKLLQAKDVLGSKKTLSKEDFYKEVKKNLDDSKASQEILDTIALDSFMPKQRTNENGVIPYQLHQLELDRIIKNQGKYYPFLKEVNPVSSHLKEAPYKLDELIRFRVPYYVGPLISPNESTKNKQTKKNQNFAWMIRKEQGQITPWNFDQKVDRMASANKFIKRMTTKDTYLLGEDVLPANSLLYQKFTVLNELNNIKINGKRISVPLKEELYNNLFKKNSTVTTNKLKSYLKENYNLINVEIKGLADEKKFNSGLTTYNKLRNLKIFDQQLDDLNYDKDFERIIEWSTIFEDKAIYKDKLKTIKWLSDRQIDKLSKIRMQGWGQLSKKLLSQLTDNNGQTIIEQLWDSQNNFMQIVNQSDFKDAIAVANQNLLVNTSVEDILNEAYTSPANKKAIRQVVKVVDDIVKAASGKVPKQIAIEFTRDADDKAKISQTRANKLRKVYKELSNELASETIRNELERVAKDQKLLKDKYYLYFMQLGRDAYTGEPINIDDLGQYDIDHILPQSFIKDDSLENRVLVKKAVNNGKSDNVPVKLYGNRMAADLGMTIRHMWEKWKDQGLITKTKYNNLIIDPDKINKYESSGFIHRQLVETSQIIKLVSTILQSKYPDTEIIVVKARYNHYLRKHLNLYKSREVNDYHHAIDAYLSAICGNLLYQVYPYLRPFFVYGQYKKFSSDPKKEKIIYDKTRKYNFISQIFENKSNDIISLETKKKVFDKKDIIEKLKHAYNYKYMLVSRETETHDQEMFKMTVYPRLSRDTKKSRNLISKKKDMPTEIYGGYTNNSDAYMVIARINKKKGTEYRVFGVPMRELVNLRKAEKNGRYNAYLKQVLEPEIMYSKNGKKNKTISSFEIVKAKVPYKQVILDGDKKFMLASSTYVQNAKQLTLSQNSMQAITDNCENDTEEEKALEEKALIEAYDEILTNIDKYLPLFDINKFREKLHAGREKFINLSLDVKKDTILQVLNGLHDNAVMPKIKSLGLSTPLGFMQFSSGVPLSENAKLIYQSPTGLFEKRVKISDL

SEQ ID NO: 153 - protein, 1426 aa, Sphingobacterium spiritivorum
MKHILGLDLGTNSIGWALIKQDFENKQGEILGMGSRIIPMSQDILGDFGKGNSVSQTAERTKYRSVRRLRERFLLRRERLHRILNVLGFLPEHYASQIDFTKRFGKFKEETEPKLVYSNEGFIFKKSFEEMLSDFKTHQPQLLEDNKKIPYDWTIYYLRKKALSRKIEKEELAWILLNFNQKRGYYQLRGEEEEENPNKLIEFYSLKIVDVLADEPQKGKSDIWYSLILENGWIYRRSSKTPLFDWKEKTRDFIVTIDLNDDGSVKTDKEGNEKRSFRAPGENDWTLVKKKTEQEIDSSRKTVGTYIYETLLKNPKQKIKGKLVRTIERKFYKTELKQILEKQKEFHPELRQDDLYSDCVRELYKNNEAHQLTLSKKDFVHLFMEDIIFYQRPLGSQKSSISNCTLEFRKYKDENGTEHTQYLKAIPKSNPYYQEFRIWQWMYNLNIYKKEDDTNVTKDFLNTKADFESLFEFLNNRKEVDQKALLKHFKLNDKTHRWNYVEDKKYPCNETKTMILSRLDKVENISDDFLTREMEQKIWHIIYSVNDKVEYEKALKSFAGKNNLEDNSFFEAFKKFPPFKSEYGAFSEKAIKKLLPLMRMGKFWNYNNISEQSKSRIQKIITGEYDENIKDKVREKAIHLTTETDFQGLQLWLVQYIVYGRHSEAAMLGKWNSADDLEEFLKEFKQHSLRNPIVEQVITETLRVVKDIWQKYGNGAKDFFREIHIELGREMKLPAEERERLTRQISENENTNFRIKALLAEMMDDNSVENVRPFSPMQQEILKIYEEGVLNSDIEIEDDILKISKTAQPSSSDLKRYKLWLEQKYKSPYTGQIIPLNKLFTPEYEIEHIIPQSRYFDDSFTNKIICESAVNKLKDNYIGLEFIKKLGGSIVECGNGKSVAILKHDAYEDFIKKHYANNRSKRNKLLLEDIPEKMIERQMNDTRYISKYISGVLSNIVRVEDGTDEGVNSKNIVPGNGKITTQLKQDWGLNDVWNDLILPRFERMNHLTNSTDFTAWNENHQKFLPTVPVEFSKGFSKKRIDHRHHALDALVIACATKDHVNLLNNQSAKSDTKRYDLKKKLMKFEKVAYNHPQTGERIEREAPKQFLKPWETFTIDAKNHLETIIVSFKQNLRVINKATNYYEKYVEKEGTKVKERVEQKGTNWAIRKPMHKETVSGKIDLPRIKVPKGKILTATRKSLDTSFNLKTIGSITDTGIQKILKNYLQYKDNNPELAFSPEGIEDMNKNIEKFNNGKAHQSISKVRVFELGSKFPLGQSGNKKEKYVEAAKGTNLFFAIYQDKNGKRSYETIPLNEVIERQKQGLSVVDLKGVDDFYLSPNDLVYVPSEDELENISMIDFNKMSSERIYKVVSFTGNQIFFVRQDIATSVVNKAEFSTLNKMERAIDGTMIKETCVKLQIDRLGNISKI

SEQ ID NO: 154 - protein, 1361 aa, Lactobacillus casei; identical to SEQ ID NO: 70

SEQ ID NO: 155 - protein, 1436 aa, Bacteroides fragilis
MKRILGLDLGTNSIGWALVNEAENKDERSSIVKLGVRVNPLTVDELTNFEKGKSITTNADRTLKRGMRRNLQRYKLRRETLTEVLKEHKLITEDTILSENGNRTTFETYRLRAKAVTEEISLEEFARVLLMINKKRGYKSSRKAKGVEEGTLIDGMDIARELYNNNLTPGELCLQLLDAGKKFLPDFYRSDLQNELDRIWEKQKEYYPEILTDVLKEELRGKKRDAVWAICAKYFVWKENYTEWNKEKGKTEQQEREHKLEGIYSKRKRDEAKRENLQWRVNGLKEKLSLEQLVIVFQEMNTQINNSSGYLGAISDRSKELYFNKQTVGQYQMEMLDKNPNASLRNMVFYRQDYLDEFNMLWEKQAVYHKELTEELKKEIRDIIIFYQRRLKSQKGLIGFCEFESRQIEVDIDGKKKIKTVGNRVISRSSPLFQEFKIWQILNNIEVTVVGKKRKRRKLKENYSALFEELNDAEQLELNGSRRLCQEEKELLAQELFIRDKMTKSEVLKLLFDNPQELDLNFKTIDGNKTGYALFQAYSKMIEMSGHEPVDFKKPVEKVVEYIKAVFDLLNWNTDILGFNSNEELDNQSYYKLWHLLYSFEGDNTPTGNGRLIQKMTELYGFEKEYATILANVSFQDDYGSLSAKAIHKILPHLKEGNRYDVACVYAGYRHSESSLTREEIANKVLKDRLMLLPKNSLHNPVVEKILNQMVNVINVIIDIYGKPDEIRVELARELKKNAKEREELTKSIAQTTKAHEEYKTLLQTEFGLTNVSRTDILRYKLYKELESCGYKTLYSNTYISREKLFSKEFDIEHIIPQARLFDDSFSNKTLEARSVNIEKGNKTAYDFVKEKFGESGADNSLEHYLNNIEDLFKSGKISKTKYNKLKMAEQDIPDGFIERDLRNTQYIAKKALSMLNEISHRVVATSGSVTDKLREDWQLIDVMKELNWEKYKALGLVEYFEDRDGRQIGRIKDWTKRNDHRHHAMDALTVAFTKDVFIQYFNNKNASLDPNANEHAIKNKYFQNGRAIAPMPLREFRAEAKKHLENTLISIKAKNKVITGNINKTRKKGGVNKNMQQTPRGQLHLETIYGSGKQYLTKEEKVNASFDMRKIGTVSKLAYRDALLKRLYENDNDPKKAFAGKNSLDKQPIWLDKEQMRKVPEKVKIVTLEAIYTIRKEISPDLKVDKVIDVGVRKILIDRLNEYGNDAKKAFSNLDENPIWLNKEKGISIKRVTISGISNAQSLHVKKDKDGKPILDENGRNIPVDFVNTGNNHHVAVYYRPVIDKRGQLVVDEAGNPKYELEEVVVSFFEAVTRANLGQPIIDKDYKTTEGWQFLFSMKQNEYFVFPNEKTGFNPKEIDLLDVENYGLISPNLFRVQKFSLKNYVFRHHLETTIKDTSSILRGITWIDFRSSKGLDTIVKVRVNHIGQIVSVGEY

SEQ ID NO: 156 - protein, 1517 aa, Bacteroides sp.
MKKIVGLDLGTNSIGWALINAYINKEHLYGIEACGSRIIPMDAAILGNFDKGNSISQTADRTSYRGIRRLRERHLLRRERLHRILDLLGFLPKHYSDSLNRYGKFLNDIECKLPWVKDETGSYKFIFQESFKEMLANFTEHHPILIANNKKVPYDWTIYYLRKKALTQKISKEELAWILLNFNQKRGYYQLRGEEEETPNKLVEYYSLKVEKVEDSGERKGKDTWYNVHLENGMIYRRTSNIPLDWEGKTKEFIVTTDLEADGSPKKDKEGNIKRSFRAPKDDDWTLIKKKTEADIDKIKMTVGAYIYDTLLQKPDQKIRGKLVRTIERKYYKNELYQILKTQSEFHEELRDKQLYIACLNELYPNNEPRRNSISTRDFCHLFIEDIIFYQRPLKSKKSLIDNCPYEENRYIDKESGEIKHASIKCIAKSHPLYQEFRLWQFIVNLRIYRKETDVDVTQELLPTEADYVTLFEWLNEKKEIDQKAFFKYPPFGFKKTTSNYRWNYVEDKPYPCNETHAQIIARLGKAHIPKAFLSKEKEETLWHILYSIEDKQEIEKALHSFANKNNLSEEFIEQFKNFPPFKKEYGSYSAKAIKKLLPLMRMGKYWSIENIDNGTRIRINKIIDGEYDENIRERVRQKAINLTDITHFRALPLWLACYLVYDRHSEVKDIVKWKTPKDIDLYLKSFKQHSLRNPIVEQVITETLRTVRDIWQQVGHIDEIHIELGREMKNPADKRARMSQQMIKNENTNLRIKALLTEFLNPEFGIENVRPYSPSQQDLLRIYEEGVLNSILELPEDIGIILGKFNQTDTLKRPTRSEILRYKLWLEQKYRSPYTGEMIPLSKLFTPAYEIEHIIPQSRYFDDSLSNKVICESEINKLKDRSLGYEFIKNHHGEKVELAFDKPVEVLSVEAYEKLVHESYSHNRSKMKKLLMEDIPDQFIERQLNDSRYISKVVKSLLSNIVREENEQEAISKNVIPCTGGITDRLKKDWGINDVWNKIVLPRFIRLNELTESTRFTSINTNNTMIPSMPLELQKGFNKKRIDHRHHAMDAIIIACANRNIVNYLNNVSASKNTKITRRDLQTLLCHKDKTDNNGNYKWVIDKPWETFTQDTLTALQKITVSFKQNLRVINKTTNHYQHYENGKKIVSNQSKGDSWAIRKSMHKETVHGEVNLRMIKTVSFNEALKKPQAIVEMDLKKKILAMLELGYDTKRIKNYFEENKDTWQDINPSKIKVYYFTKETKDRYFAVRKPIDTSFDKKKIKESITDTGIQQIMLRHLETKDNDPTLAFSPDGIDEMNRNILILNKGKKHQPIYKVRVYEKAEKFTVGQKGNKRTKFVEAAKGTNLFFAIYETEEIDKDTKKVIRKRSYSTIPLNVVIERQKQGLSSAPEDENGNLPKYILSPNDLVYVPTQEEINKGEVVMPIDRDRIYKMVDSSGITANFIPASTANLIFALPKATAEIYCNGENCIQNEYGIGSPQSKNQKAITGEMVKEICFPIKVDRLGNIIQVGSCILTN

SEQ ID NO: 157 - protein, 1399 aa, Olsenella uli
MNLRNTTDEYNIGLDMGTNSVGWAVTDKAGAIAHFKGKPTLGSRLFDAAQTAAGARIHRSQRRRYVRRRWRLDLLQSLFQDEVSKVDSEFFCRLRQSRLYVGDREKGHADYTWPIFNDSDFNEVDYYKRFPTIYHLRKWLMETDEKADIRLIYLATHNIVKHRGNFLRENNKSLSSRDANPAQAVKSLRLALNDWCSERDYECAWKGEEDDGAIDEAILNVLADGEKGRSDQAKEIAKLTGVDCGDAKQSKQCNEAIAKAIVGLKVEMKNIFGEFPAEKTSYIYLSSDEDVEAVRESCPDDSGELFQALCKLYSAYILQELLSYADPSGQTISANMVAKYKQYGRDLRLLKELTRTYAPQKYDLFFRGETYAGSSDYVVDEARGYTRYNLGTTKANYDDFQKSVKELFKGTDALQDERYQEMMVAFGEQKFLRRLKTSDNGSIYYQLHLEELHTILENQGKHYPFLLSEEDKIESLVSFRIPYYVGPLTRKNAAIGHDGKERFAWSSRKDGMEHAVITPWNWEEIIDRDKSAEDFIMRMTGDCTYLQGEPVLPKCSLLYEEFCALNEFNGAHWTVDGDDERRFDAAQRERIMCDLFRRTRSVTYNKVSDWLERKYNFTGARVRGGQGEHGFESKLGSYIFFCKDVFKTDGLDEADYTMIEQIILWSTLFEDRDILKRKIEEAYGGDRLTSEQIKVICKKRFTGWGRLSKRLLTDIKVNTDTGRKSIMDVLREGNPNNGQRSRTMVFMEVLRDEDLGFQKAIDGLNRDYFREHNNGLMDVNDLPGSPAIRRSINQAVRIVDEIASIARKEPTNIFIEVTREEDDPRKKGKRTKRRYDAIKSALEKFKKDDPSLWKELCEKAPGDMDERLSLYFMQRGKCMYSGRPIKIEELHTGKYEVDHIIPRSYIKDDSFENKVLVYREENQHKTDALLIDSSIRQKMGGYWRMLHDAKLVGDKKFRNLFRNHIDDKAMKGFVARQIVETSQMVKLVQTLFEARYPNTRIVPVKAGISHDLREAAGLVKCREANDFHHAHDAFLACRIGLFIQKRHPSVYDNPIGLARIMRDYARMQAREYKKSHCLAHTQGFIVNSFLSSGFDEETGEIFKDDWDAKAEVEGIRRVLNCRQCFISRMPVEGDTRYGGRYWGETIYSPKGKHKHEIPLKQGLDPNLYGGYSDLLYSYFLIYEASDVSSGERVLRFIGIPTSIAARMANQKRLEEYVSRLALQENLEHVRMVRKIMKKQLIEVDNCRLLVTAADAVTNATELAFSLDEMKIISTCAKCINGADPSAIDKIGNAQDSFFDNLKRRGSDRCALLFSQLKLDKLSQNFYMISSDDKSKILISILDRIRAKSNSVDLSLVGGAKHAAQMKFDFNAKLNNPASSFVLIDQSVTGMFERRTRIGL

SEQ ID NO: 158 - protein, 1398 aa, Veillonella atypica
METQTSNQLITSHLKDYPKQDYFVGLDIGTNSVGWAVTNTSYELLKFHSHKMWGSRLFEEGESAVTRRGFRSMRRRLERRKLRLKLLEELFADAMAQVDSTFFIRLHESKYHYEDKTTGHSSKHILFIDEDYTDQDYFTEYPTIYHLRKDLMENGTDDIRKLFLAVHHILKYRGNFLYEGATFNSNAFTFEDVLKQALVNITFNCFDTNSAISSISNILMESGKTKSDKAKAIERLVDTYTVFDEVNTPDKPQKEQVKEDKKTLKAFANLVLGLSANLIDLFGSVEDIDDDLKKLQIVGDTYDEKRDELAKVWGDEIHIIDDCKSVYDAIILMSIKEPGLTISQSKVKAFDKHKEDLVILKSLLKLDRNVYNEMFKSDKKGLHNYVHYIKQGRTEETSCSREDFYKYTKKIVEGLADSKDKEYILNEIELQTLLPLQRIKDNGVIPYQLHLEELKVILDKCGPKFPFLHTVSDGFSVTEKLIKMLEFRIPYYVGPLNTHHNIDNGGFSWAVRKQAGRVTPWNFEEKIDREKSAAAFIKNLTNKCTYLFGEDVLPKSSLLYSEFMLLNELNNVRIDGKALAQGVKQHLIDSIFKQDHKKMTKNRIELFLKDNNYITKKHKPEITGLDGEIKNDLTSYRDMVRILGNNFDVSMAEDIITDITIFGESKKMLRQTLRNKFGSQLNDETIKKLSKLRYRDWGRLSKKLLKGIDGCDKAGNGAPKTIIELMRNDSYNLMEILGDKFSFMECIEEENAKLAQGQVVNPHDIIDELALSPAVKRAVWQALRIVDEVAHIKKALPSRIFVEVARTNKSEKKKKDSRQKRLSDLYSAIKKDDVLQSGLQDKEFGALKSGLANYDDAALRSKKLYLYYTQMGRCAYTGNIIDLNQLNTDNYDIDHIYPRSLTKDDSFDNLVLCERTANAKKSDIYPIDNRIQTKQKPFWAFLKHQGLISERKYERLTRIAPLTADDLSGFIARQLVETNQSVKATTTLLRRLYPDIDVVFVKAENVSDFRHNNNFIKVRSLNHHHHAKDAYLNIVVGNVYHEKFTRNFRLFFKKNGANRTYNLAKMFNYDVICTNAQDGKAWDVKTSMNTVKKMMASNDVRVTRRLLEQSGALADATIYKASVAAKAKDGAYIGMKTKYSVFADVTKYGGMTKIKNAYSIIVQYTGKKGEEIKEIVPLPIYLINRNATDIELIDYVKSVIPKAKDISIKYRKLCINQLVKVNGFYYYLGGKTNDKIYIDNAIELVVPHDIATYIKLLDKYDLLRKENKTLKASSITTSIYNINTSTVVSLSNKVGIDVFDYFMSKLRTPLYMKMKGNKVDELSSTGRSKFIKMTLEEQSIYLLEVLNLLTNSKTTFDVKPLGITGSRSTIGVKIHNLDEFKIINESITGLYSNEVTIV

SEQ ID NO: 159 - protein, 795 aa, Prevotella disiens
MEKQRILGLDPGTNSLGWAVLDFDNSKQEYNLVRKGEVIFEEGVGKSKRGEFSKAAYRTFYKSTRKHYFRRRLRKIEVLKVLVKYDFCPYLSDDLLKQWHEKKIYPAVKEFMDWQRTSDAEGKNPYYDRHCCLNEKLDLSLKSDRYVLGRALYHLTQRRGFKSNRLIQNNDENEEGKVKKGISELSTEMQEANCNYLGDYFYKLYTEKGNTVQIRKRYTDREKHYKNEFNAICEKQELNETIVKELDKAIFFQRKLKPQRHGVGKCTFEPNNRRCAISHPDFERFRMLCFINNIKIKTPFEENLRPLNNEEKALIEPLFYRKSIKNFDFEEIAKKLAGKNNYCYIKDDSSKQYKFNYRMSQGASTCQTIAKLKSIFGEEWKNGIAETYTNRRKKEGLKKQAEMVDDIWNVLYSVSECDVLKDFAINKLQLDEKTADNFSKTKLAQGFATLSLKAIRKILPFLEQGFGYTEAVFLANIPTVVGKEYWNNEDIRNDIMEEIKTIFYHNTLKTNDSHNTILFCIKDILSNNFDLAPGAIDKLYHPSMINVYKDVIPNEDGILQLGSPKIDAVKNPMAMRSLHIIRKVVNELLREGIINSDTEVRIEYARELNDANKRHAIADWQKKQYGKHQKYRKEIKELFKAETGFEIEPNETDILKFELWEEQNHICLYTGQEIGISEFVGENPKYDIEHTIPRSLGGDSTKMNMTLCENKFNRENKQKKLPSELANHSEILERIDDWKKKIYILQKKYDSIRTHNGMDKENKDKKIVSMQVRISGSSICVYSQNTLLWLQYGYN

SEQ ID NO: 160 - protein, 1428 aa, Burkholderiales bacterium
MGKTHIIGVGLDLGGTYTGTFITSHPSDEAEHRDHSSAFTVVNSEKLSFSSKSRTAVRHRVRSYKGFDLRRRLLLLVAEYQLLQKKQTLAPEERENLRIALSGYLKRKGYARTEAETDTSVLESLDPSVFSSAPSFTNFFNDSEPLNIQWEAIANSPETTKALNKELSGQKEADFKKYIKTSFPEYSAKEILANYVEGRRAILDASKYIANLQSLGHKHRSKYLSDILQDMKRDSRITRLSEAFGSTDNLWRIIGNISNLQERAVRWYFNDAKFEQGQEQLDAVKLKNVLVRALKYLRSDDKEWSASQKQIIQSLEQSGDVLDVLAGLDPDRTIPPYEDQNNRRPPEDQTLYLNPKALSSEYGEKWKSWANKFAGAYPLLTEDLTEILKNTDRKSRIKIRSDVLPDSDYRLAYILQRAFDRSIALDECSIRRTAEDFENGVVIKNEKLEDVLSGHQLEEFLEFANRYYQETAKAKNGLWFPENALLERADLHPPMKNKILNVIVGQALGVSPAEGTDFIEEIWNSKVKGRSTVHSICNAIENERKTYGPYFSEDYKFVKTALKEGKTEKELSKKFAAVIKVLKMVSEVVPFIGKELRLSDEAQSKFDNPYSLAQLYNLIETERNGFSKVSLAAHLENAWRMTMTDGSAQCCRLPADCVRPFDGFIRKAIDRNSWEVAKRIAEEVKKSVDFTNGTVKIPVAIEANSFNFTASLTDLKYIQLKEQKLKKKLEDIQRNEENQEKRWLSKEERIRADSHGICAYTGRPLDDVGEIDHIIPRSLTLKKSESIYNSEVNLIFVSAQGNQEKKNNIYLLSNLAKNYLAAVFGASDLSQITNEIESTVLQLKAAGRLGYFDLLSEKERACARHALFLNSDSEARRAVIDVLGSRRKASVNGTQAWFVRSIFSKVRQALAAWTQETGNELIFDAISVPAADSSEMRKRFAEYRPEFRKPKVQPVASHSIDAMCIYLAACSDPFKTKRMGSQLAIYEPINFDNLFTGSCQVIQNTPRNFSDKTNIANSPIFKETIYAERFLDIIVSRGEIFIGYPSNMPFEEKPNRISIGGKDPFSILSVLGAYLDKAPSSEKEKLTIYRVVKNKAFELFSKVAGSKFTAEEDKAAKILEALHFVTVKQDVAATVSDLIKSKKELSKDSIENLAKQKGCLKKVEYSSKEFKFKGSLIIPAAVEWGKVLWNVFKENTAEELKDENALRKALEAAWPSSFGTRNLHSKAKRVFSLPVVATQSGAVRIRRKTAFGDFVYQSQDTNNLYSSFPVKNGKLDWSSPIIHPALQNRNLTAYGYRFVDHDRSISMSEFREVYNKDDLMRIELAQGTSSRRYLRVEMPGEKFLAWFGENSISLGSSFKFSVSEVFDNKIYTENAEFTKFLPKPREDNKHNGTIFFELVGPRVIFNYIVGGAASSLKEIFSEAGKERS

SEQ ID NO: 161 - protein, 1025 aa, Unknown
  Description of Unknown: gamma Proteobacterium polypeptide
MGGYMPQLMRYRLALDIGSTSIGWAMIRLSMQNEPIAIIRMGVRIFSDGRNPKDGSSLAVTRRVARQMRRRRDRLLKRKTRLLNALVQKKFFPEDADARKALVVLNPYELRKEGLYRQLSGPEFGRALFHISQRRGFLSNRKTDKKDNDSSVLKKAIVDLRQQLEVENCQTIGEWLFKQQQSGKSVRARLRGKTQKDKAYDFYIDRAMIAHEFDTLWVSQAKYDPLLFNEDARAILRDILLYQRPLKPVKPGRCTLIPDESRAPLALPLTQQARIYQELNHLRITTPALGAQALTVAQRNTIAALLEKSDVTFVKIAKALGLTSTTEFNLQDIKRDRLKGNATAIILARNQYFGRRWHDFNADLQNLIVDKLVNEGSETALIEWLKANTDVDESAAERVSGVTLPEGYGSLSVAALRRLLPALKEDVVVYSEAVKRAGFDSHSALSLIEQTGELYQELPYYGEVLQRHVGFGSGDPNDSPERRFGKIANPTVHIGLNELRKIINALIKRYGNPAEVVVELARDLKLSREKRKEIQEEQKQRQDRNEKRIKDACEILGIDPLVIDRGKRREISQKMQLWDELNPKDAANRRCPYTGDQISIEKLLSAEVEIEHILPFSKTLDDSLNNKTVAMRRANRDKGNRTPYEAFGESLNPDYDYDAILQRASLMPREKRKRFASDGYQQWLRDDKDFLSRALNDTAYLSRIAKEYLTLICPPNSVRAIPGRMTAQLRAMFGLNRLLSEGGIKNREDHRHHAIDAAVIGVTDQGLLQKFSRASARTRELQLSRLVDDMPLPWDTYREHVTRALEHLVVSHKPDHGYQGKMHEDTAWGLRDNGQVTRRVRSEDGGPRQRLLENKNVVKINSTRDFSRHGIDEQGQVNAYKGYVGGSNYCIEIWIDEKGKWNSDVVSTFQAYQIVRELGEKAAWQKLRNPLLSLSAKPLVMRLIIDDVVKMQIAGQNKIMRVVKIAQNGQIFFAEHNEANVDARDKDKNNPFKYISKTAGSLQKAGGIHMAISPIGDARPVRYGR

SEQ ID NO: 162 - protein, 1364 aa, Pediococcus acidilactici
MGDRKYNLGLDIGTSSIGFAAVDENNQPIRVKGKTAIGVRLFEEGKTAADRRGFRTTRRRLSRRRWRINLLNEIFDAHLAEVDPTFLARLKESNRSNLDPKKSFQGSLLFPERKDYQFYEEYPTIYHLRKALMEKDRKFDFREIYLAVHHIIKYRGNFLNGTPMRSFKVENIELDTLFDQLNQLYAEIVPDNELAFDLAQVADVKDVLSSTTIYKMDKKKQLVKMMLLPASNKALQSENKKIVTQFVNAILNYKFKLDVLLQVETDADWSLKLNDEGADDKLEEFTGDLDENRLEIIDLLQRLHNWFSLNEITKDGNSLSAAMVEKYENHHHHLGLLKKVIENHPDAKKAKALKETYTAYVGKTDDKTQNQDDFYKAVEKNLDDSPDAKEIKRLIQLDQFMPKQRTGQNGAIPHQLHQQELDQIIEKQSKYYPFLAEPNPNVKRRKDAPYKLDELIAFKIPYYVGPLVTPEEQAQNGENVFAWMKRKAAGPITPWNFDEKVDRMESANRFIRRMTTKDTYLFGEDVLPAESMIYQKFVVLNELNNLKINGRHLSLKDKQDVYNDLFKQQKTVSIKALQNYYVTKKKAATAPTVGGLADPKKFLSSLSTYIDFKNMFGERVNDPQFQEDLEQIVEWSTIFEDRGIFKAKLQALGWLSEKQIQQLVAKRYKGWGRLSKKLLTGLKNAEGYSILDEMWRSTGNFMQIQSRPEFAALIQQANEKQFEGNDPDNVWENIENILGDAYTSPQNKKAIRQVVKVVQDIEKAVGNPPEKIAIEFTREAAANPQRTQSRLRTLEKLYESAEEVVDAGLTAELAEFKENKHVLSDKYYLYFTQLGRDVYTGDTISLDKLNDYDVDHILPQSFIKDDSLDNRVLTIRAVNNGKSDNVPAKMFGKKMGSFWRYLLDNGMISKRKYNNLITDPDNISKYAQKGFINRQLVETSQVIKLTANILNGIYDKDTEIIEVPAKMNSQMRKMFDLVKVREVNDYHHAFDAYLTIFIGNYLYKCYPKLQPYFVYDNFKKFGNKEDIGHKRFNFLGKIEREKKVVAPETGEILWSNVAPNETIKQIKKVYDYKFMIVSREITTRRAELFNQTVYPKNYHGKLIPIKEDRPTDLYGGYSGNTDAYLAIVALEDKKKGKYFKVVGIPTRVAAKLEKLKQQDSQQYLQALHKVIAPQFTKSTKKGIKKTEFEIVLDKVHYRQLVQDGPVKMMLGSSTYKYNAKQLVLSEKALQVIADDRKFDETQKDDNLIAVYDEILSIVNQSFDLYDINGFRKKLNDNRDQFIDLPAETKYEGRKVVAHGKREMILEILKGLHANAAFGNLKPIGFSTAFGQLQVPNGIILSKNAILIHQSPSGLFERKIKLSDL

SEQ ID NO: 163 - protein, 1364 aa, Peptoniphilus duerdenii
MKNLKEYYIGLDIGTASVGWAVTDESYNIPKFNGKKMWGVRLFDDAKTAEERRTQRGSRRRLNRRKERINLLQDLFATEISKVDPNFFLRLDNSDLYREDKDEKLKSKYTLFNDKDFKDRDYHKKYPTIHHLIMDLIEDEGKKDIRLLYLACHYLLKNRGHFIFEGQKFDTKNSFDKSINDLKIHLRDEYNIDLEFNNEDLIEIITDTTLNKTNKKKELKNIVGDTKFLKAISAIMIGSSQKLVDLFEDGEFEETTVKSVDFSTTAFDDKYSEYEEALGDTISLLNILKSIYDSSILENLLKDADKSKDGNKYISKAFVKKFNKHGKDLKTLKRIIKKYLPSEYANIFRNKSINDNYVAYTKSNITSNKRTKASKFTKQEDFYKFIKKHLDTIKETKLNSSENEDLKLIDEMLTDIEFKTFIPKLKSSDNGVIPYQLKLMELKKILDNQSKYYDFLNESDEYGTVKDKVESIMEFRIPYYVGPLNPDSKYAWIKRENTKITPWNFKDIVDLDSSREEFIDRLIGRCTYLKEEKVLPKASLIYNEFMVLNELNNLKLNEFLITEEMKKAIFEELFKTKKKVTLKAVSNLLKKEFNLTGDILLSGTDGDFKQGLNSYIDFKNIIGDKVDRDDYRIKIEEIIKLIVLYEDDKTYLKKKIKSAYKNDFTDDEIKKIAALNYKDWGRLSKRFLTGIEGVDKTTGEKGSIIYFMREYNLNLMELMSGHYTFTEEVEKLNPVENRELCYEMVDELYLSPSVKRMLWQSLRVVDEIKRIIGKDPKKIFIEMARAKEAKNSRKESRKNKLLEFYKFGKKAFINEIGEERYNYLLNEINSEEESKFRWDNLYLYYTQLGRCMYSLEPIDLADLKSNNIYDQDHIYPKSKIYDDSLENRVLVKKNLNHEKGNQYPIPEKVLNKNAYGFWKILFDKGLIGQKKYTRLTRRTPFEERELAEFIERQIVETRQATKETANLLKNICQDSEIVYSKAENASRFRQEFDIIKCRTVNDLHHMHDAYLNIVVGNVYNTKFTKNPLNFIKDKDNVRSYNLENMFKYDVVRGSYTAWIADDSEGNVKAATIKKVKRELEGKNYRFTRMSYIGTGGLYDQNLMRKGKGQIPQKENTNKSNIEKYGGYNKASSAYFALIESDGKAGRERTLETIPIMVYNQEKYGNTEAVDKYLKDNLELQDPKILKDKIKINSLIKLDGFLYNIKGKTGDSLSIAGSVQLIVNKEEQKLIKKMDKFLVKKKDNKDIKVTSFDNIKEEELIKLYKTLSDKLNNGIYSNKRNNQAKNISEALDKFKEISIEEKIDVLNQIILLFQSYNNGCNLKSIGLSAKTGVVFIPKKLNYKECKLINQSITGLFENEVDLLNL

SEQ ID NO: 164 - protein, 1089 aa, Corynebacterium matruchotii
MNSANVNYRVGIDVGSYSLGMAAIAIDDDGKPTEILSAISLIHDSGVDPDSAKSAATRLATSGIARRTRRLYRRKRKRLAKLDKFISSQGWPLKEFEKYEDPFYPWRVRAELATTAITDQQELGEKLSIALRHIARHRGWRNPYSKVTALYTVTEPSDAFLAMQEECAKQLGRTIPETITVGQLVTGMNLGKTRLRGENSLLAARPRQSDNANEIHTIAKVQGLSNELVRQIIDHVFAAESPKGSAAEQVGKDPLQPTKKRALKASDAFQQYRIAALIGNLRIRGGKGNRRLTTEETRLVFDYLRSLPAKQEPTWQLVAEQLKIDRGNLVGTAIMTDDGERAGAKPPVHDTNRIMENTKIKPLATWWKSADADARAAMVKALSNAEVDDFDSQAGAQVQEFFFGISDEDQEKLDGLHLPIGRAAYSEDTLDRLTKRMIGEGMDLYEARQAEFKISNDWAPPAPEIGERVGNPAVDRVLKATARWLNAAERQWGAPKSVNIEHVRAAFMSESSARELDRDNQQRAKRNVKVVAEMQEKLGIEGRPSRADVWRFQSIQRQNGKCAYCGAEISFKNSEMDHIIPQAGEGSTNTRDNLVAVCRECNSSKSNIAFAVWAENTSRPGVSVQKAIERTHHWVTDSGLRKPEFDKFRKQVCDRLRRKATDEPIDARSLESVAWMANELRSRIAQKFKDGDTKVRVYKGALTAEARRASGISGKLEFVDGKGKSRLDRRHHAVDAAVVAFTSNYVAETLALRSNMKFDQELRRKAPQWREFTGSDHVHQVEWTKWKYRMQALAELLNNALVQDRIVVMHNLRLRLGNGAAHEDTIGKLTRLKVGDAISTTDIDRASSEALWCALTRDPDYDPKTGLPENPNRTIRIHGTHLTASDEITVFPVAAASIPIRDGFAKLGSNYHHVRLFRVPSGKKYKYCLMQVYTVDLLKFRKEDLFTVELKPQTISVRTCEALLRKALANGTAEYLGWLVSDDELLIDTSSFDTPGIVKLREEYGPVNRWRLAGLTSVTRLNLRPLYLSKEGLKPNVNPEIKKIIDNRSWIITVNKLFSSGHVKIIRRDALGRPRLHSAAHLPICWEVK

SEQ ID NO: 165 - protein, 1134 aa, Streptococcus mitis
MNGLVLGLDIGIASEGVGILEKNSGKIIHANSRLFPAATADNNVERRKNRQARRLNRRKKHRGVRFQDLFEDYGLLTDFSKVSINLNPYRLRVDGLNQQLTNEELFIALKNIVKRRGISYLDDASEDGGAVSSDYGKAVEENRKLLAEQTPGQIQLERFEKYGQVRGDFTVVENGEKLRLINVFSTSAYKKEAERILRKQQEFNNQITDEFIEDYLKILTGKRKYYHGPGNEKSRTDYGRFRTDGTTLDNIFGILIGKCTFYPEEYRASKASYTAQEFNLLNDLNNLTVPTETKKLSEEQKKVIVEYAKEAKTLGASTLLKYIAKMIDASVDQIRGYRVDVNNKPEMHTFEVYRKMQSLETISVGELSRNVLDELAHILTLNTEREGMEEAINTKLKDSFSQDQVLELVQFRKNNSSLFSKGWHNFSLKLMMELIPELYETSEEQMTILTRLGKQKSKETSKRTKYIDEKELTEEIYNPVVAKSVRQAIKIINEATKKHGIFDNIVIEMARENNEEDAKKDYIKRQKANQDEKNAAMEKAAFQYNGKKELPDNIFHGHKELATKIRLWHQQGEKCLYTGKTIPISDLIYNQYKYEIDHILPLSLSFDDSLSNKVLALATANQEKGQRTPFQALDSMDDAWSYREFKSYVKDLKSLSNKKKDYLLTEEDISKIEVKQKFIERNLVDTRYSSRVVLNALQDFYKSHQFDTTISVVRGQFTSQLRRKWGLEKSRETYHHHAVDALIIAASSQLRLWKKQNNPLITYKEGQFVDSQTGEIISLTDDEYKELVFKAPYDHFVDTLSSKTFEDSILFSYQVDSKFNRKISDATIYATRKAKLDKEKKEYTYTLGKIKDIYSLGTKTPSKTGFYKFLDLYNKDKSQFLMFQKDRKTWDEVIEKIMEQYRPFKEYDKTGKLVDFNPFEKYRQENEPIRKYSKKGNGPEIKSLKYYDILLGKHKNITPEGSRNTVALLSLNPWRTDVYYNMETKKYEFLGLKYADLPFEEGGAYGISTETYNELREKEGIGKNSEFKFTLYKNDLILIKDTETNCQQIFRFWSRTGKDNPKSFEKHKIELKPYEKARFEKGEELEVLGKVPPSSNQLQKNMQIENLSIYKVKTDVLGNKHFIKKEGDKPKLKF

SEQ ID NO: 166 - protein, 1373 aa, Streptococcus bovis
MTKKNYSIGLDIGTNSVGWAVITDDYKVPAKKMKVLGNTDKKYIKKNLLGALLFDSGETAEATRLKRTARRRYTRRKNRLRYLQEIFAEEMTKVDESFFQRLDESFLRWDDDNKKLGRYPIFGNKADVVKYHQEFPTIYHLRKHLADSSEKADLRLVYLALAHMIKFRGHFLIEGELNAENTDVQKIFADFVGVYDRTFDDSHLSEITVDAASILTEKISKSRRLENLIKYYPTEKKNTLFGNLIALALGLQPNFKMNFKLSEDAKLQFSKDSYEEDLGELLGKIGDDYADLFTSAKNLYDAILLSGILIVDDNSTKAPLSASMIKRYVEHQEDLEKLKEFIKANKSELYHDIFKDKNKNGYAGYIENGVKQDEFYKYLKNTLSKIAGSDYFLDKIEREDFLRKQRTFDNGSIPHQIHLQEMHAILRRQGDYYPFLKENQDRIEKILTFRIPYYVGPLARKDSRFSWAEYHSDEKITPWNFDKVIDKEKSAEKFITRMTLNDLYLPEEKVLPKHSHVYETYAVYNELTKIKYVNEQGKDSFFDSNMKQEIFDHVFKENRKVTKEKLLNYLNKEFPEYRIKDLIGLDKENKSFNASLGTYHDLKKILDKAFLDDKVNEEVIEDIIKTLTLFEDKDMIHERLQKYSDIFTADQLKKLERRHYTGWGRLSYKLINGIRNKENNKTILDYLIDDGSANRNFMQLINDDTLPFKQIIQKSQVVGDVDDIEAVVHDLPGSPAIKKGILQSVKIVDELVKVMGDNPDNIVIEMARENQTTNRGRSQSQQRLKKLQNSLKELGSNILNEEKPSYIEDKVENSHLQNDQLFLYYIQNGKDMYTGDELDIDHLSDYDIDHIIPQAFIKDDSIDNRVLTSSAKNRGKSDDVPSLDIVRARKAEWVRLYKSGLISKRKFDNLTKAERGGLTEADKAGFIKRQLVETRQITKHVAQILDARFNTESDENDKVIRDVKVITLKSNLVSQFRKDFEFYKVREINDYHHAHDAYLNAVVGTALLKKYPKLASEFVYGEYKKYDIRKFITNSSDKATAKYFFYSNLMNFFKRVIRYSNGKVIVRPVVEYSKDTEDIAWDKKSNFRTICKVLSYPQVNIVKKVETQTGGFSKESILPKGDSDKLIPRKTKKAYWDTKKYGGFDSPTVAYSVFVVADVEKGKAKKLKTVKELVGISIMERSFFEENPVEFLENKGYHNIREDKLIKLPKYSLFEFEGGKRRLLASASELQKGNEMVIPGHLVKLLYHAQRINSFNSTKYLDYVSAHKKEFEKVLSCVEDFANLYVDVEKNLSKIRAVADSMDNFSIEEISNSFINLLTLTALGAPADFNFLGEKIPRKRYTSTKECLNATLIHQSITGLYETRIDLSKIGEE

SEQ ID NO: 167 - protein, 1099 aa, Corynebacterium accolens
MSLLYRVGIDVGTYSLGCTAIEVDDNDQPVSILSSVSLIHDSGLDPDQQKRAVTRLASSGVARRTRRLYRRRRRRMVKLENFLTAQGWETLPFERYSDPYLPWHARVALVNGYISDDTQRGQYLSIAFRHIANHRGWRNPYWKVSSLYSPDKPSDAFEQIRKELEASTGRQIPETATVGQLISFAQFGKDRLRGGGKQKDKKKPQEQVNQAVISARLHQIDHAREINEICRVQKIDDTLRKQILDLVFAAESPKGAQKGRVGKDPLQPKLFRALKASDAFQQYRIAALTGNLRIYRNGVTVPLDRDEKLIVFNYLVNLPKKEEPSWLKIAEILNIDRGQLRGTATMTDDGERAGATPPVHDTNRTILDSKVKPLAHWWENASDDERAAMLKSLSNSEVEDFDSPAGAQVQAFFADLDETEQEKLDSLHLPMGRAAYSEDTLMRLTNRMLDENLDLYEARLAEFGIPKDWAPPAPRIGEPVGNPAVDRVLKGVARWLEAAADEWGAPKSVVIEHVRDGFVSKSKAIEIDRANNNRHKRNRELFQKMQENLGIEGKVRSSDLWRYQSVQRQNCQCAYCGSPITYTTCEMDHIVPRAGEGSTNTRDNLVATCHRCNLAKKNIPFAVWAEKSTIPGVSVKEALDRTRHWSEDSGMSKKDFQKFRKNVCERLNRTVVDEPLDARSMESVAWMANELRGRVAQRFQEENTTVNVYRGALTAEARRAAGITDKLRFIDGTGKSRLDRRHHAVDAAVVAFIHNYVAETLAIRSNKKREAQLLQGTSQWKEFTGSDDKHRAVWNAWIPKMQKLAVLLQIALDEDRIVVTSNLRLRLGNGRAHEDTISELKTIRVGDAISVTDIDRASSEALWCALTREPDFDEKDGLPENPNRRIRVHGTWYDAEDEIEVFPVGAGAIKVRGGYAKLSRFHHARVYKIPGKKAPIYCMLRVYNTDLVQHRHEDLFSVELKPQTMSVRQAEPKLRKALAENTAEYLGWLVTDDELIIDTSTFRTGLIEEMQSEFGLVRRWRLDGFDSPSLLTLRPLHMSAEGLPDDCALGSRKIIDTKGWRVSINKVFNAGNTTVVRRDALGRARLTSNAHLPISWKEE

SEQ ID NO: 168 - protein, 1054 aa, Actinobacillus pleuropneumoniae
MKLTPLNYILGLDLGIASVGWAVVEIDEQENPLGLIDVGVRTFDRAEVAKTGESLALARRLARSSRRLVKRRADRIKKVKRLLKSENILLSADEQLPNDVWQLRVKGLDQKLERQEWAAVLLHLLKHRGYLSQRKNESKSENKELGALRSGVAANHQILQSAEYRTPAEIAVKKFHVEEGHIRNQRGAYTHTFSRLDLLAEIELLFTRQTELGNPHTSAKLLENLTALLMWQKPALAGEAILKMLGKCTFEPTEYKAAKNSYSAERFVWLTKLNNLRILEQGAERALTDNERFALLDQPYEKAKFTYAQARTMLALPDEAIFKGVRYQGEDKKAVETKTILMEMKAYHQIRKALENADLKAEWNELKNNSELLDDIGTAFSLHKTDEDICRYLDGKLSESILNALLENLNFDKFIQLSLKALQQILPLMLQGQRYDEAVSAIYGDHYGKKSAEINRLLPTIPADEIRNPVVLRTLTQARKVINAVVRLYGSPARIHIETGREVGKSYQDRKKLEKQQEDNRKHRESAVQKFKEYFPNFVGEPKGKDILKMRLYELQQAKCLYSGKSLELHRLLEKGYVEVDHALPFSRTWDDSFNNKVLVLANENQNKGNLTPYEWLDGKNNSEPWQNFVARVQTSGFSHTKKQRILSHKLDEKGFIERNLNDTRYVVRFLCNFIADNMLLTGKGKRKVFASNGQITALLRGRWGLQKVRDDNDRHHALDAVVVACSTVAMQQKITRFVRYEEGNVFSGERIDRETGEIIPLHFPSPWAFFRENVEIRIFSENPKLELENRLPDYPQYNHEFVQPLFVSRMPTRKMTGQGHMETVKSAKRLDEGLSVLKVPLTQLKLNDLERMVNREREMALYESLKVRLEQFDNDPAKAFAEPFYKKGGALVKAVRVEQTQKSGVLVRDGNGVADNASMVRVDVFTKAGKYFLVPIYTWQVAKGILPNKAVTANVDEIDWLEMDESYQFIFTMYPNDLVKVKLKKEEFFGYYGGLDRATGAIVIKEHDLEKSKGRQGIYRIGVKLALSFEKYQVDELGKNIRPCRPTKRQHVR

SEQ ID NO: 169 - protein, 1369 aa, Lactobacillus iners
MNNNYYLGLDLGTNSVGWAVTDDHYNIIKFHGKHMWGMRLFEEAETAKDRRLHRQARRRRQRLVERINLLEELFDKEISKVDQGFFARKKESDLHFEDKTTKSEYALFNDKSYTDRDYYKQYPTIFHLIMDLIENDKKRDIRLVYLACHYLIKHRGHFIFDGKNFTVDNSFENLLDKLITYLKDNDDITLSFPKDQLINIFKNSNLNSTEKSDQLKPFFGRTNLEKGIIKLLSGGKQDLSNMFRDETLKNSNYKNLKFSDNRFDDERDGYAADLGDRIDLLILLKQIYDASILESMMSQARVSIDGHKYISSAKVCAYEKHKSDLKRLKSLIKKYLPSEYNNIFRKITEKDNYVAYSKSNITNNKREKALKYVKYVDFTKYLTKKLKTIKTQDAEDDQEIFEIKGELEKQSFLPKQRTLDNSIIPYQLHLMELKKILDNQSKYYDFLLAKDDQEGITVKDKIISLLTFRLPYYIGPVNPAVHGKFAWVKRLANGKVTPWNYKEKIDIDASHEEFIKTKLSKCSFLIGCDVLPKNSLLYQKYMVLSELNTIKFNGVNISEKLKDDIYQNLFKNIQKVTKKRLQNYIKEHENIIGDVIVTGIDNAFKQGLVSYLKFKKIIGDKVDDDRYQKVLEKIIRDITLYDECAGKKIKKEYKDSDLFTEDELNKIVKLTFNDWGRLSAELLDQLEGEDTVSGETGKIIEFMQKHNYNLMQLMSKKFTFKSKIDEINKSYYQHDKFNYKSMIDSLYVSPATKRILWQSLKVVHEISKIMKHDPEKIFIEMARSKEDHPKRKLSRKADLKQVYKDSKKQIISIIGKDKYQDLSNELDNKDDRDLRWDNLYLYYTQLGRSMYSLKPIDISELMNKNLYDQDHIFPKSKKYDDSIENRVLVEKELNVKKSDIYPISDANIIPQKIKGQVESFWKMLYDHKLIGDKKYARLIRSKAFTDDELAGFIARQLVETRQATKETADLLKRLCPKSRIVYAKAQNASIFRQKFDIPKSRTINDLHHAQDAYLNIVVGNIFDTKFTQDPRNFIKNTKDSRNYNLEKIYDYNVERNNYVAWIAPDGETNGTIANVKCNLSTKDFRVTRPSFYKKGALFNQNLSRKGSNLAPIKEHSPKSNPLKYGGYSGKNNSFFVVVAGKDNKGKDIVKLIPVNTLIYNKMLHCDYKAKQELLTSYVANNFAINNFRIVKDDIKMYSLVKIDGAYYYLVGGTDERIEVKNAMQLLLSKDSIKAVKILEKESKDQFANIKNYKDIDIKLGRTFNEVVSKYTNSVFGKSMLISDKYRKDIFKSVEKSILEFNHLDTIGKADNLLKFVTLMRPSGSAHSLKMVGLIERIRKSNVISNFNEFKLINQSVTGLFENEEDLLKL

SEQ ID NO: 170 - protein, 1420 aa, Bifidobacterium bifidum
MSRKNYVDDYAISLDIGNASVGWSAFTPNYRLVRAKGHELIGVRLFDPADTAESRRMARTTRRRYSRRRWRLRLLDALFDQALSEIDPSFLARRKYSWVHPDDENNADCWYGSVLFDSNEQDKRFYEKYPTIYHLRKALMEDDSQHDIREIYLAIHHMVKYRGNFLVEGTLESSNAFKEDELLKLLGRITRYEMSEGEQNSDIEQDDENKLVAPANGQLADALCATRGSRSMRVDNALEALSAVNDLSREQRAIVKAIFAGLEGNKLDLAKIFVSKEFSSENKKILGIYFNKSDYEEKCVQIVDSGLLDDEEREFLDRMQGQYNAIALKQLLGRSTSVSDSKCASYDAHRANWNLIKLQLRTKENEKDINENYGILVGWKIDSGQRKSVRGESAYENMRKKANVFFKKMIETSDLSETDKNRLIHDIEEDKLFPIQRDSDNGVIPHQLHQNELKQIIKKQGKYYPFLLDAFEKDGKQINKIEGLLTFRVPYFVGPLVVPEDLQKSDNSENHWMVRKKKGEITPWNFDEMVDKDASGRKFIERLVGTDSYLLGEPTLPKNSLLYQEYEVLNELNNVRLSVRTGNHWNDKRRMRLGREEKTLLCQRLFMKGQTVTKRTAENLLRKEYGRTYELSGLSDESKFTSSLSTYGKMCRIFGEKYVNEHRDLMEKIVELQTVFEDKETLLHQLRQLEGISEADCALLVNTHYTGWGRLSRKLLTTKAGECKISDDFAPRKHSIIEIMRAEDRNLMEIITDKQLGFSDWIEQENLGAENGSSLMEVVDDLRVSPKVKRGIIQSIRLIDDISKAVGKRPSRIFLELADDIQPSGRTISRKSRLQDLYRNANLGKEFKGIADELNACSDKDLQDDRLFLYYTQLGKDMYTGEELDLDRLSSAYDIDHIIPQAVTQNDSIDNRVLVARAENARKTDSFTYMPQIADRMRNFWQILLDNGLISRVKFERLTRQNEFSEREKERFVQRSLVETRQIMKNVATLMRQRYGNSAAVIGLNAELTKEMHRYLGFSHKNRDINDYHHAQDALCVGIAGQFAANRGFFADGEVSDGAQNSYNQYLRDYLRGYREKLSAEDRKQGRAFGFIVGSMRSQDEQKRVNPRTGEVVWSEEDKDYLRKVMNYRKMLVTQKVGDDFGALYDETRYAATDPKGIKGIPFDGAKQDTSLYGGFSSAKPAYAVLIESKGKTRLVNVTMQEYSLLGDRPSDDELRKVLAKKKSEYAKANILLRHVPKMQLIRYGGGLMVIKSAGELNNAQQLWLPYEEYCYFDDLSQGKGSLEKDDLKKLLDSILGSVQCLYPWHRFTEEELADLHVAFDKLPEDEKKNVITGIVSALHADAKTANLSIVGMTGSWRRMNNKSGYTFSDEDEFIFQSPSGLFEKRVTVGELKRKAKKEVNSKYRTNEKRLPTLSGASQP

SEQ ID NO: 171 - protein, 1092 aa, Ilyobacter polytropus
MKYSIGLDIGIASVGWSVINKDKERIEDMGVRIFQKAENPKDGSSLASSRREKRGSRRRNRRKKHRLDRIKNILCESGLVKKNEIEKIYKNAYLKSPWELRAKSLEAKISNKEIAQILLHIAKRRGFKSFRKTDRNADDTGKLLSGIQENKKIMEEKGYLTIGDMVAKDPKFNTHVRNKAGSYLFSFSRKLLEDEVRKIQAKQKELGNTHFTDDVLEKYIEVFNSQRNFDEGPSKPSPYYSEIGQIAKMIGNCTFESSEKRTAKNTWSGERFVFLQKLNNFRIVGLSGKRPLTEEERDIVEKEVYLKKEVRYEKLRKILYLKEEERFGDLNYSKDEKQDKKTEKTKFISLIGNYTIKKLNLSEKLKSEIEEDKSKLDKIIEILTFNKSDKTIESNLKKLELSREDIEILLSEEFSGTLNLSLKAIKKILPYLEKGLSYNEACEKADYDYKNNGIKFKRGELLPVVDKDLIANPVVLRAISQTRKVVNAIIRKYGTPHTIHVEVARDLAKSYDDRQTIIKENKKRELENEKTKKFISEEFGIKNVKGKLLLKYRLYQEQEGRCAYSRKELSLSEVILDESMTDIDHIIPYSRSMDDSYSNKVLVLSGENRKKSNLLPKEYFDRQGRDWDTFVLNVKAMKIHPRKKSNLLKEKFTREDNKDWKSRALNDTRYISRFVANYLENALEYRDDSPKKRVFMIPGQLTAQLRARWRLNKVRENGDLHHALDAAVVAVTDQKAINNISNISRYKELKNCKDVIPSIEYHADEETGEVYFEEVKDTRFPMPWSGFDLELQKRLESENPREEFYNLLSDKRYLGWFNYEEGFIEKLRPVFVSRMPNRGVKGQAHQETIRSSKKISNQIAVSKKPLNSIKLKDLEKMQGRDTDRKLYEALKNRLEEYDDKPEKAFAEPFYKPTNSGKRGPLVRGIKVEEKQNVGVYVNGGQASNGSMVRIDVFRKNGKFYTVPIYVHQTLLKELPNRAINGKPYKDWDLIDGSFEFLYSFYPNDLIEIEFGKSKSIKNDNKLTKTEIPEVNLSEVLGYYRGMDTSTGAATIDTQDGKIQMRIGIKTVKNIKKYQVDVLGNVYKVKREKRQTF

SEQ ID NO: 172 - protein, 994 aa, Streptococcus downei
MENQRGKRQRITHQEPYSIGLDIGTASVGSAVINNDLTVPQKRFKVRDINGNVIKTIKKNMSSVLIFDEANPAKGARTKRTSRRRYTRRNFRLLELKKLFEKEIEKIDPNFFHRIKEDSFFNWNDKEFDKHPLFGNLKEEKKFHNNYPTVFHLRNEIGKNSSKKFDLRLVYLALAHIIKYRGHFLDETFDPDASVSVEKRLNDFIVEYNELFDKDLRSEAKFSEILMSDSSNSVKIESTLSLYPSEKNTIFQVFLKLIVGNQGDFNKFFKDELESSSHSGKLVFSSDEVEDEKEELISIIGEDYLDIINLCQSLYSTVALAKIISTDTGESNTPLSASMVKRYNEHKGDLANLKGIVKHFIPEKYEEVFGEHSKTGYTAYIRNPNKMPEKKFYDYLYHEGEKGKISGILSDSRIYELPAVQKFILKIEQKSFLKKQRTKENGLIPYQLHLKELKIIIENQSEYYPFLHEIEEKLEKLLTFRIPYFVGPLAQTKYINPRFNWLVRKSEDHIKPWNFSEIVDEEKSATKFIEKLISNDQFLFGEKVLPKRSIIYQQFLIFNELTKVSYQIKDGPSRNFDSETKEEIFNSLFKKNKLGCVTVVDLKNYIKNDQCLSEKEDIQIEGIKKKFNSSYSTYADLSEISGLKELLDDDTQLDLVEEIIRILTVFEDKKMRTKQLEKLNLPANVDIEKLCKKHYKGWANVSRQLIDGIADRSRGFKKTILDYLKDDDIPNNDAFSTKVQKSLNRNFAQLITDKSLDFARKLDESYKIDVKKDYPSLVEDIPGSPAIRRAILQSLYTVDEIIGVMGRMPKNIVIEMARTNEVSDSPKTRKERIKKLIKETENDADALNFGISKVSEIFDEVKKDENLFKELEVYLYFLQEGKDMYGTETREGHRQPKEINFYDVKNSTGKYHIDHIIPQSLYSGNPLDNIVLTESTNNKIKDKDVPDEATVYEMKNFWLYLMKKGAISKKKFSFLTKIEQGGLSNEDKFGFINR

SEQ ID NO: 173 - protein, 1052 aa, Aminomonas paucivorans
MIGEHVRGGCLFDDHWTPNWGAFRLPNTVRTFTKAENPKDGSSLAEPRRQARGLRRRLRRKTQRLEDLRRLLAKEGVLSLSDLETLFRETPAKDPYQLRAEGLDRPLSFPEWVRVLYHITKHRGFQSNRRNPVEDGQERSRQEEEGKLLSGVGENERLLREGGYRTAGEMLARDPKFQDHRRNRAGDYSHTLSRSLLLEEARRLFQSQRTLGNPHASSNLEEAFLHLVAFQNPFASGEDIRNKAGHCSLEPDQIRAPRRSASAETFMLLQKTGNLRLIHRRTGEERPLTDKEREQIHLLAWKQEKVTHKTLRRHLEIPEEWLFTGLPYHRSGDKAEEKLFVHLAGIHEIRKALDKGPDPAVWDTLRSRRDLLDSIADTLTFYKNEDEILPRLESLGLSPENARALAPLSFSGTAHLSLSALGKLLPHLEEGKSYTQARADAGYAAPPPDRHPKLPPLEEADWRNPVVFRALTQTRKVVNALVRRYGPPWCIHLETARELSQPAKVRRRIETEQQANEKKKQQAEREFLDIVGTAPGPGDLLKMRLWREQGGFCPYCEEYLNPTRLAEPGYAEMDHILPYSRSLDNGWHNRVLVHGKDNRDKGNRTPFEAFGGDTARWDRLVAWVQASHLSAPKKRNLLREDFGEEAERELKDRNLTDTRFITKTAATLLRDRLTFHPEAPKDPVMTLNGRLTAFLRKQWGLHKNRKNGDLHHALDAAVLAVASRSFVYRLSSHNAAWGELPRGREAENGFSLPYPAFRSEVLARLCPTREEILLRLDQGGVGYDEAFRNGLRPVFVSRAPSRRLRGKAHMETLRSPKWKDHPEGPRTASRIPLKDLNLEKLERMVGKDRDRKLYEALRERLAAFGGNGKKAFVAPFRKPCRSGEGPLVRSLRIFDSGYSGVELRDGGEVYAVADHESMVRVDVYAKKNRFYLVPVYVADVARGIVKNRAIVAHKSEEEWDLVDGSFDFRFSLFPGDLVEIEKKDGAYLGYYKSCHRGDGRLLLDRHDRMPRESDCGTFYVSTRKDVLSMSKYQVDPLGEIRLVGSEKPPFVL

SEQ ID NO: 174 - protein, 1023 aa, Helicobacter cinaedi
MKIYSFDIGVASIGWAFIENEVLQDCGIRIFTKAENPKNGASLALPRREARGVRKRLARRRGRLNTIKQLLCKEFGLQLEDYLSNDGELPKAYTASKANPLKSPYELRTLALSQKLDSKDLVRVILHIAKHRGYGNKHAKDSKDTESGKVKKAIEFNRKTLAEKGYRSVGEYLYREFFQQSRISQNNGATEFINVRNKAGNYEHCVAQDMLKEELESILNAQRQFGFSLKQDFENKLLTKIFEQRPLKSFADKVGNCCFIAGEKRAPKDSPSAIEFIALSRTINTLINLSKESGEIYNRAIILQIVESTLKKGEISYKELREIIRLDERLRFKDPRLDYSREIKEAEKVKFLEFKQLKGFKKALGESFTTLAISQLDEIAEHIALIKDRVKLNEKLESYALTKEQREALSNLSFSAHINLSLQALKQILPFMRGDNGEQCLDYDESVEKAGLKALSKDTLKGQMLPPLNEFEPYLSNPVVARALAEYRKVLNVLLKQYGSPHKIHIEYAREAKLSSTERQKYEKEQKDNYAANQAAHKKCQELGLEPSSTNLLKLKLWQEQGGLCLYSGAKITISYLQDPTALQVDHIYPYSRSFDDSYMNKCLVLTKANQEKGNRTPFEAFGTDSAKWGVITTLAQKLPHKKRRRILNTAFNDKEAGFKLRNLNDTSYIARLVADYTETYLEFLPLVESENTTLSKGQKGSKKHIAIVNGVLTSTMRYYLGFASKDRDNHLHHALDAVIIGFMNDSVIKAFSDFKKTQETSKAAYYAHTLSKQEYKKQRAFIQLPSGENFRVSVLEKVESVFVSKPPRKRVRGALHEATFYSPNDPKLLKNYGGTKGVERALALGKMRKVGAKIVSNGAMVRVDIFRHKSSGKFYGVPVYTMDFALGILPNKAVVVGKDQNGVIKDWLEMDSSYEFIFSLYKDDVILVQKKEMQRPELCYFVSFDTSGASIKVAKHDNNFSTLTENQKLLFSNATKEEVVGKSIGIQNLKVFEKWQVSVLGEVKRTQSYPRENISLASKAKK

SEQ ID NO: 175 - protein, 874 aa, Listeria seeligeri
LANGQSEFSWLTRKADGEIRPWNIEEKVDFGKSAIDFIEKMTNKDTYLPKENVLPKHSMCYQKYMVYNELTKIRYTDDQGKTHYFSGQEKQQIFNDLFKQKRKVKKKDLELFLYNMNHVESPTVEGVEDAFNSSFTTYHDLQKVGVPQEILDDPLNTEMLEEIIKILTVFEDKRMINERLQEFSNVLDEAVLKKLERRHYTGWGRLSAKLLIGIRDKESHLTILDYLMNDDKHNRNLMQLINDSNLSFKSIIEKEQVSTADKDIQSIVADLAGSPAIKKGILQSLKIVDELVGIMGYPPQTIVVEMARENQTTGKGKNNSKPRFTSLEKAIKELGSQILKEHPTDNQGLKNDRLYLYYLQNGKDMYTGQELDIHNLSNYDIDHVVPQSFITDNSIDNRVLASSAANREKGDNVPSLEVVRKRKVYWEKLYQAKLMSKRKFDYLTKAERGGLTEADKARFIHRQLVETRQITKNVANILHQRFNCKKDESGNVIEQVRIVTLKAALVSQFRKQFQLYKVREVNDYHHAHDAYLNCVVANTLLKVYPQLEPEFVYGDYHQFDWFKANKATAKKQFYTNIMLFFAKKDRIIDENGEILWDKKYLDTIKKVLNYRQMNIVKKTEIQKGEFSNATANPKGNSSKLIPRKADWDPIKYGGFDGSNMAYAIVIEHEKRKKKTVIKKELIQINIMERTAFEKDQKEFLEGKGYRNPKVITKIPKYTLYECENGRRRMLGSANEAQKGNQMVLPNHLMTLLYHAKNCEASDGKSLAYIESHREMFAELLDSISEFASRYTLADANLEKINTIFEQNKSGDVKVIAQSFVNLLEFNAMGAPASFKYFETNIERKRYNNLKELLNATIIYQSITGLYEARKRLDD

SEQ ID NO: 176 - protein, 1082 aa, Neisseria lactamica
MAAFKPNPMNYILGLDIGIASVGWAMVEIDKEENPIRLIDLGVRVFERAEVPKTGDSLAMARRLARSVRRLTRRRAHRLLRARRLLKREGVLQDADFDENGLVKSLPNTPWQLRAAALDRKLTCLEWSAVLLHLIKHRGYLSQRKNEGETADKELGALLKGVADNAHALQTGDFRTPAELALNKFEKESGHIRNQRGDYSHTFSRKDLQAELNLLFEKQKEFSNPHVSDSLKEGIETLLMAQRPALSGDAVQKMLGHCTFEPAEPKAAKNTYTAERFIWLTKLNNLRILEQGSERPLTDTERATLMDEPYRKSKLTYAQARKLLGLEDTAFFKGLRYGKDNAEAPTLMEMKAYHAISRALEKEGLKDKKSPLNLSTELQDEIGTAFSLFKTDKDITGRLKDRVQPEILEALLKHISFDKFVQISLKALRRIVPLMEQGKRYDEACAEIYGDHYCKKNAEEKIYLPPIPADEIRNPVVLRALSQARKVINCVVRRYGSPARIHIETAREVGKSFKDRKEIEKRQEENRKDREKAAAKFREYFPNFVGEPKSKDILKLRLYEQQHGKCLYSGKEINLVRLNEKGYVEIDHALPFSRTWDDSFNNKVLVLGSENQNKGNQTPYEYFNGKDNSREWQEFKARVETSRFPRSKKQRILLQKFDEEGFKERNLNDTRYVNRFLCQFVADHILLTGKGKRRVFASNGQITNLLRGFWGLRKVRAENDRHHALDAVVVACSTVAMQQKITRFVRYKEMNAFDGKTIDKETGEVLHQKAHFPQPWEFFAQEVMIRVFGKPDGKPEFEEADTPEKLRTLLAEKLSSRPEAVHEYVTPLFVSRAPNRKMSGQGHMETVKSAKRLDEGISVLRVPLTQLKLKGLEKMVNREREPKLYDALKAQLETHKDNPAKAFAEPFYKYDKAGNRTQQVKAVRIEQVQKTGVWVRNHNGIADNATMVRVDVFEKGGKYYLVPIYSWQVAKGILPDRAVVAFKDEEDWTVMDDSFEFRFVLYANDLIKLTAKKNEFLGYFVSLNRATGAIDIRTHDTDSTKGKNGIFQSVGVKTALSFQKNQIDELGKEIRPCRLKKRPPVR

SEQ ID NO: 177 - protein, 1326 aa, Streptococcus pseudoporcinus
MLGTVLFDSGETAQARRLKRTNRRRYTRRRYRLCQLQNIFATEMVKVDDTFFQRLSESFFYYQDKAFDKHPIFGNSKEERAYHKTYPTIYHLRKDLADRDQKADLRLIYLALSHIIKFRGHFLIEGKLNSENTDVQKLFIALVTVYNLLFEEEPIAGETCDAKALLTAKTSKSKRLESLISEFPGQKKNGLFGNLLALALGLRPNFKSNFGLSEDAKLQITKDTYEEELDNLLAEIGDHYADLFLAAKNLSDAILLSDILTLSDENTRAPLSASMIKRYEEHQEDLALLKKLVKEQMPEKYWEIFSNAKKNGYAGYIEGKVSQEDFYRYIKPILSRLKGGDEFLAKIDRDDFLRKQRTFDNGSIPHQIHLKELHAILRRQEKYYPFLAEQKEKIEQLLCFRIPYYVGPLAKGGNSSFAWLKRRSDEPITPWNFKDVVDEEASAQAFIEGMTNYDTYLPEEKVLPKHSPLYEMFTVYNELTKVKYIAENMTKPLYLSAEQKEAIIDHLFKQTRKVTVKDLKEKYFSQIEGLENVDVTGVEGAFNASLGTYNDLLKIIKDKAFLDDEANAEILEEIVLILTLFQDEKLIEKRLAKYANLFEKSVLKKLRKRHYRGWGRLSRQLIDGMKDKASGKTILDFLKADDFANRNFIQLINDSSLDFEKLIDDAQKKAIKRESLTEAVANLAGSPAIKKGILQSLKVVDEIVKVMGHNPDNIVIEMSRENQTTAQGLKNARQRLKKIKEVHKKTGSRILEDNSERITNLTLQDNRLYLYLLQDGKDMYTGQDLDINNLSQYDIDHIIPQSFIKDNSIDNLVLTTQKANRGKSDNVPSIEVVRDMKDRVWRRQLANGAISRQKFDHLTKAERGGLADSDKARFLRRQLVETRQITKHVAQLLDSRFNSKSNQNKKLARNVKIITLKSKIVSDFRKDFGLYKLREVNNYHHAHDAYLNAVVGTALLKKYPKLEAEFVYGDYKHFDLVKLISKSDPSLGKATAKVFFYSNIMNFFKEELSLADGTLMKRPVIETNTETGEVVWDKVKDFKTIRKVLSYPQVNIVKKTEIQSGAFSKESVLSKGNSDKLIERKKGWDPKKYGGFDSPNTAYSIFVVAKVAKRKAQKLKTVKEIVGITIMEQAEYEKDNIAFLEKKGYQDIQEKLLIKLPKYSLFELENGRRRLLASANEFQKGNELALSGKYMKFLYLASRYDKLSSKIESEQQKKLFVEQHLHYFDEILDIVVKHATCYIKAENNLKKIISLYKKKEAYSINEQALNMLNLFIFTSLGAPSTFVFFDETIDRKRYTTSSDVLNGILIQQSITGLYETRIDLSRFGGD

SEQ ID NO: 178 - protein, 1150 aa, Enterococcus faecalis
MYSIGLDLGISSVGWSVIDERTGNVIDLGVRLFSAKNSEKNLERRTNRGGRRLIRRKTNRLKDAKKILAAVGFYEDKSLKNSCPYQLRVKGLTEPLSRGEIYKVTLHILKKRGISYLDEVDTEAAKESQDYKEQVRKNAQLLTKYTPGQIQLQRLKENNRVKTGINAQGNYQLNVFKVSAYANELATILKTQQAFYPNELTDDWIALFVQPGIAEEAGLIYRKRPYYHGPGNEANNSPYGRWSDFQKTGEPATNIFDKLIGKDFQGELRASGLSLSAQQYNLLNDLTNLKIDGEVPLSSEQKEYILTELMTKEFTRFGVNDVVKLLGVKKERLSGWRLDKKGKPEIHTLKGYRNWRKIFAEAGIDLATLPTETIDCLAKVLTLNTEREGIENTLAFELPELSESVKLLVLDRYKELSQSISTQSWHRFSLKTLHLLIPELMNATSEQNTLLEQFQLKSDVRKRYSEYKKLPTKDVLAEIYNPTVNKTVSQAFKVIDALLVKYGKEQIRYITIEMPRDDNEEDEKKRIKELHAKNSQRKNDSQSYFMQKSGWSQEKFQTTIQKNRRFLAKLLYYYEQDGICAYTGLPISPELLVSDSTEIDHIIPISISLDDSINNKVLVLSKANQVKGQQTPYDAWMDGSFKKINGKFSNWDDYQKWVESRHFSHKKENNLLETRNIFDSEQVEKFLARNLNDTRYASRLVLNTLQSFFTNQETKVRVVNGSFTHTLRKKWGADLDKTRETHHHHAVDATLCAVTSFVKVSRYHYAVKEETGEKVMREIDFETGEIVNEMSYWEFKKSKKYERKTYQVKWPNFREQLKPVNLHPRIKFSHQVDRKANRKLSDATIYSVREKTEVKTLKSGKQKITTDEYTIGKIKDIYTLDGWEAFKKKQDKLLMKDLDEKTYERLLSIAETTPDFQEVEEKNGKVKRVKRSPFAVYCEENDIPAIQKYAKKNNGPLIRSLKYYDGKLNKHINITKDSQGRPVEKTKNGRKVTLQSLKPYRYDIYQDLETKAYYTVQLYYSDLRFVEGKYGITEKEYMKKVAEQTKGQVVRFCFSLQKNDGLEIEWKDSQRYDVRFYNFQSANSINFKGLEQEMMPAENQFKQKPYNNGAINLNIAKYGKEGKKLRKFNTDILGKKHYLFYEKEPKNIIK

SEQ ID NO: 179 - protein, 1150 aa, Enterococcus faecalis
MYSIGLDLGVSSVGWSVIDERTGNVIDLGVRLFSAKNSEKNLERRTNRGGRRLIRRKTNRLKDAKKILAAVGFYEDKSLKNSCPYQLRVKGLTEPLSKGEIYKVTLHILKKRGISYLDEDDTEAAKESQDYKEQVRENAQLLTKYTPGQIQLQRLKENNRVKTGINAQGNYQLNVFKVSAYANELATILKTQQAFYPNELTDDWIALFVQPGIAEEAGLIYRKRPYYHGPGNEANNSPYGRWSDFKKTGQPATNIFDKLIGKDFQGELRASGLSLSAQQYNLLNDLTNLKIDGEIPLSPEQKEYILAELMTKEFTRFGINDVAKLLGVKKERLSGWRLDKKGKPEIHTLKGYRNWRKIFAESGIDLATLPTETIDCLAKVLTLNTEREGIENTLAFELPELAESVKLLVLDRYKELSQSVSTQAWHRFSLKTLHLLIPELMNATSEQNTLLEQFQLKSDVRKRYSEYKKLPTKDVLTEIYNPTVNKTVSQAFKVIDALLVKYGKEQIRYITIEMPRDDNEEDEKKRIKELHAKNSQRKNDSQSYFMQKSGWSQEKFQTTIQKNRRFLAKLLYYYEQDGICAYTGLSISPELLVSDSTEIDHIIPISISLDDSINNKVLVLSKANQVKGQQTPYDAWMDGSFKKINGKFSNWDDYQKWVESRHFSHKKENNLLETRNIFDSEQVEKFLARNLNDTRYASRLVLNTLQSFFANQETKVRVVNGSFTHTLRKKWGADLDKTRETHHHHAVDATLCAVTPFVKVSRYHYAVKEETGEKVMREIDFETGEIVDEMSYREFKKSKKYERKTYQVKWPNFREQLKPVNLHPRIKFSHQVDRKANRKLSDATIYSVREKTEVKTLKSGKQKITTDEYTIGKIKDIYTVDGWEAFKKKQDKLLMKDLDEKTYERLLSIAETTPDFQEVEEKNGKVKRVKRSPFAVYCEENDIPAIRKYAKNNNGPLIRSLKYYDGKLNKHINITKDSQGRPVEKTKNGRKVTLQSLKPYRYDIYQDLETKAYYTVQLYYSDLRFVEGKYGITEKEYMKKVAEQTKGQVVRFCFSLQKNDGLEIEWKDSQCYDVRFYNFQSANSINFKGLEQEMMPAENQFKQKPYNNGAINLNIAKYGKEGKKLRKFNTDILGKKHYLYYEKEPKNIIK

SEQ ID NO: 180 - protein, 1345 aa, Streptococcus anginosus
MDQKYSIGLDIGTNSVGWAVVTDDYKVPAKKMKVLGNTDKQSIKKNLLGALLFDSGETAEATRLKRTARRRYTRRRNRLRYLQEIFAEEMNKVDENFFQRLDDSFLVDEDKRGERHPIFGNIAAEVKYHDDFPTIYHLRKHLADISQKADLRLVYLALAHMIKFRGHFLIEGQLKAENTNVQALFKDFVEVYDKTVEESHLSEMTVDALSILTEKVSKSRRLENLIAHYPAEKKNTLFGNLIALSLGLQPNFKTNFQLSEDAKLQFSKDTYEEDLEGLLGEIGDEYADLFASAKNLYDAILLSGILTVDDNSTKAPLSASMVKRYEEHQKDLKKLKDFIKVNAPDQYNAIFKDKNKKGYAGYIENGVKQDEFYKYLKGILLQINGSGDFLDKIDREDFLRKQRTFDNGSIPHQIHLQEMHAILRRQEEHYPFLKENQDKIEKILTFRIPYYVGPLARKGSRFAWAEYKADEKITPWNFDDILDKEKSAEKFITRMTLNDLYLPEEKVLPKHSLLYETFTVYNELTKVKYVNEQGEAKFFDANMKQEIFDHVFKENRKVTKDKLLNYLNKEFEEFRIVNLTGLDKENKAFNSSLGTYHDLRKILDKSFLDDKANEKTIEDIIQTLTLFEDREMIRQRLQKYSDIFTKAQLKKLERRHYTGWGRLSYKLINGIRNKENKKTILDYLIDDGYANRNFMQLINDDALSFKEEIARAQIIGDVDDIANVVHDLPGSPAIKKGILQSVKIVDELVKVMGHNPANIIIEMARENQMTDKGRRNSQQRLKLLQDSLKNLDNPVNIKNVENQQLQNDRLFLYYIQNGKDMYTGETLDINNLSQYDIDHIIPQAFIKDNSLDNRVLTRSDKNRGKSDDVPSIEVVHEMKSFWSKLLSVKLITQRKFDNLTKAERGGLTEEDKAGFIKRQLVETRQITKHVAQILDERFNTEFDGNKRRIRNVKIITLKSNLVSNFRKEFELYKVREINDYHHAHDAYLNAVVGNALLLKYPQLEPEFVYGEYPKYNSYRSRKSATEKFLFYSNILRFFKKEDIQTNEDGEIAWNKEKHIKILRKVLSYPQVNIVKKTEEQTGGFSKESILPKGESDKLIPRKTKNSYWNPKKYGGFDSPVVAYSILVFADVEKGKSKKLRKVQDMVGITIMEKKRFEKHPVDFLEQRGYRNVRLEKIIKLPKYSLFELENKRRRLLASARELQKGNELVIPQRFTTLLYHSYQIEKNYEPEHREYVEKHKDEFKELLEYISVFSRKYVLADNNLTKIEMLFSKNKDAEVSSLAKSFISLLTFTAFGAPAAFNFFGENIDRKRYTSVTECLNATLIHQSITGLYETRIDLSKLGED

SEQ ID NO: 181 - protein, 849 aa, Listeria ivanovii
  MOD_RES (780)..(780): Any naturally occurring amino acid
LIDKNGTPQHITMIDKMRGKCTYFPEEVRIAKMSYTAELFGLLNDFNNIYFADPETGEKIGFTEADKKYFIDTFIHDQKGVKNITLKQIMKHKNIINETDIFGYRINTKNGTPIFTEFKGLKALKKALKEVDLPDEFYQNTEMMDEIANILSSEKSFTRREEQLKELFLAAFNDELEEAVKELINDITFKEFHSLSKKAIMVILPELWSTNQNQMQLFVQHKMDKSRLENLQNGTKIQFDDEAILSTIAKRAHRETIKIVDAVRAKYGELDYVIVEMAREKNSDEQKKVYNRAQKKQGDFEKEMCKLLGVSELKELRLNGKQHLALKFWKEQDGKCIYSGKPIALSDIVNNFNGLLEIDHIIPISISYDDSQQNKVLCLRSENQRKGQLSPYQYLIRGMGERSFDAFKAEVLSRHFGKKKQNYLLEMEDIANNDELRKHFINRNLVDTRYAMRTFSNTLKTFYTVNGIPTKVMPVNGAMTSALRKRAKLNKDRDAGHAHHAIDALIVAAIGRLPLIKQLAELRVNEEGEFADKITDKGLDDKTAFDDKTLKFLRNLLNYESKVKYSHKVDRKPNRSLSKQTLYSTREKDGEKYIIGKVKNIYTLDKAGYAALKKRIDKNPEDFLMAQHNPKTWEEIIKIMEVYSKADNPFKEFYDEHGFIMKDGKVPVKSLRYHDKKLGIHVPLTHKYENTRHDVVLLKRNSLRVDIYMNKEGVYKYQGVPYNWFNQKGDKYILDMEKYHNEIDGTRASFKNIDNTFEFQFSLYKNDVFSYMKKDKEGEXVSYTKLFRSDSSPRENRLEVENIDMRTSSQQMPTINPLKNLIKYNTDILGNTYPIQKEKFVTVFTLHSK

SEQ ID NO: 182 - protein, 1457 aa, Prevotella buccae
MKTILGLDLGTNSIGWAKVSVDDYGNYLHDIKLGSRIIPMSQDVLGNFDSGVTVSQTAQRTEFRSKRRLVQRNLQRRERLHRVLHVLDFLPAHYDAAIGWDRTEAVTYGKFLNHAEPKLAWEELGNGKRRFLFMDSFHEMVADFARCQPALVADGKKIPLDWTIYYLRKKALTQAITKEELAWILLNFNQKRGYYQLRGEEEEENPTKQEEYYELKVVSVEATDSRKGNDTWYNVHLENGWIYRRSSKISLDDWVGKVKQFIVTTEYEKDGATLKTDKEGYVKRSFRAPNENDWGLRKKRTETLLEMSGKTVGAFIYDHLLQEPADKIRGNFIRTIERHYYKAELEAILAEQCKYHIELRDKEMLEACARELYLNNLPHQRSLMKKDMTYLLLYDLIFYQRPLKSKKALIANCPYEYYEYVDKETGEIKRQNIKCIAKSNPYFQEFRLWQFVLNLRLFDRVEDKEVTANYLPTADDHARLFTYLNDRKEINQETLLKDYFKLKKVKIGNEKEYPIRWNYIEDKEKKYPCNETRYELLMALDRAGIEHKWLDDNNLEYRLWHLLYSVEVKSESETALRKLKNDDAFVNSFLKVKPFKKEYGAYSEKAIKRLLAVMRKGFLWNEQDICDETRKRIEIIIKGDVDEKVKERMGHAAYSFDRVSDFQGLPEWLACYVVYGRHSEAMDIQHWDSPERLMAYINNFKQYSLRNPIVEQCILETLRTVHDIWKETGQIDEIHVELGREMKSTSEERARRTQNVLRNENTNLRIKSLLIELKNDTDICNVHPYSPMQQEILRIYEEGALQELNREDEDFEEISKISQMSQPSGKELNRYKLWLEQKYRSPYTGKAISLAKLFTPAYQIEHVIPQSRYFDDSFTNKVICEAEVNTLKSNLLGYEFIKKHGGEIIHCTTLGDVRIFSESEYKAFVMDHYANNKSKKDKLLMEDIPQEFLSRQMNDSRYISKVVKTLLSNIVRMADESEATSKSVIVCTGGVTDRLKKDWGLNDVWNSIVYSRFERLNRLTGTEAFGHWENKDGKRVFQTSMPLELQRGFRKKRIDHRHHAMDALVIACASRNIVNYLNNESANNPKKREDLRRQLCDKNRVIRKPWETFTQDAYNALENVVVSFKNYVRVINKATNRYEHYDENGKKRFVQQKGSELWAIRKPMHKETYYGHVNLRRKELVTLQKALDDIPSICDKKLRDYISALVEKHFNKRQLLAHFKSTDYYWQKQYVNKVYVWTFSDDIKPLVATRKLLDTSFDAKRIGTITDTGIQKILRNYLEAKGGNATLAFTPEGIAEMNQNISKYNDGKPHQPILKVRITEPMGAKYRVGQTGNKMAKYVEAQSGTNLYFAIYEDSEGKRSYTTVPLDEVAERLKQRLSPVPEKDENDVPLKFYLSPNDLVYVPTEEELQLRECKLNKDRIYKMVSSTGNECHFIPYYVANVIYNKGGFNMQMHRPQS

SEQ ID NO: 183 - protein, 1330 aa, Enterococcus italicus
MKNDYTIGLDIGTNSVGYSVVTDDYKVISKKMNVFGNTEKKSIKKNFWGVRLFESGQTAQEARMKRTSRRRIARRKNRICYLQEIFQPEMNHLDNNFFYRLNESFLVADDAKYDKHPIFGTLDEEIHFHEQFPTIYHLRKYLADGDEKADLRLVYLAIAHIIKFRGNFLIEGELNTENNSVIELSKVFVQLYNQTLSELEGFQFIDESIDFSEVLTQQLSKSERADNVLKLFPDEKGTGIFAQFIKLIVGNQGNFKKVFQLEEDQKLQLSTDDYEENIENLLAIIGDEYGDIFVAAQNLYQAILLAGILTSTEKTRAKLSASMIQRYEEHAKDLKLLKRFVKEHIPDKYAEIFNDATKNGYAGYIDGKTKEEEFYKYLKTTLVQKSGYQYFIEKIEQENFLRKQRIYDNGVIPHQVHAEELRAILRKQEKYYSFLKENHEKIEQIFKVRIPYYVGPLAKHNEQSRFAWNIRKSDEPIRPWNMNDVVDENASAVAFIERMTIKDIYLNENVLPRHSLIYEKFTVFNELTKVLYADDRGVFQRFSAEEKEDIFEKLFKSERKVTKKKLENYLRIELSISSPSVKGIEEQFNANFGTYLDLKKFDELHPYLDDEKYQDTLEEVIKVLTVFEDRSMIQNQLEQLPLNLSTKTIKALSRRKYTGWGRLSARLIDGIHDKNSGKTILDYLIEDESDSYIVNRNFMQLINDDHLSFKKIIEDSQPYKEQQSAEEIVSELSGSPAIKKGILQSLKIVDELVAIMGYKPKNIVVEMARENQTTGRGKQNSKPRLKGIENGLKEFSDSVLKGSSIDNKQLQNDRLYLYYLQNGKDMYTGHELDIDHLSTYDIDHIIPQSFLTDNSIDNRVLTTSKSNRGKSDNVPSEEVVRKMDRFWRKLLNAKLISERKYTNLTKKELTESDKAGFLKRQLVETRQITKHVATILDSKFNEDSNNRDVQIITLKSALVSEFRKTFNLYKVREINDLHHAHDAYLNAVVALSLLRVYPQLKPEFVYGEYGKNSIHDQNKATIKKQFYSNITRYFASKDYIINDDGEILWNKQETIAQVIKTLGMHQVNVVKKVEIQKGGFSKESIQPKGESQKLIRRKQQWNTKKYGGFDSPVVAYAILLSFDKGKRKARSFKIVGITIQDRESFEGNPILYLSKKDYHNPKVEAILPKYSLFEFENGRRRMVASASETQKGNQLIIPGHLMELLYHSKKIINGKNSDSVSYIQNNKEKFREIFEYIVDFSSKYISADANLNKIEKIFENNFHKASEQEIAKSFINLLTFTAMGAPADFEFFGEKIPRKRYVSISEIIDAVFIHQSITGLYETRVRLTEV

SEQ ID NO: 184 - protein, 1123 aa, Mobiluncus curtisii
MFVYLNSPRGFGPATFLTDLPHFCIIFGNNDFMDNRKYHVGIDVGTNSVGFAAVEVGDSGSPIRFLNTMVVIHDSGVDPEQKKYAITRLASAGTARRTRRLYRTRRQRLRELDDFISNELGYPLVNLENFADPYEPWKVRADLATIKLPADELPEAMSIALRHMARHRGWRSPYQRVEALHLHAEISEEFSALKKRVMEKTGDVFSDDATPAEVLVDLMGRQKIRGADGMLSGKLRQSDNANELRKIASVQGIDDETLNRIIDRVFFSRSPKGKASERVGMDALPGQGSKPRALKAMPSFQKFRIVSVICNLRIKDSGDDNRPLSMEEKEQLIGYLMSSTTDDHVTWTDVAELLHVKRSNLQGTAKEGPDGERPYTRPPVNSAWSKIKDSKIKSLVALWKTGDVDVQSAIVEALSNASVLEDARPGADIVVAYLESLDDKELESLDKVGLPAGRASYSEDSLERLTERMLQDDCDLFEARKREFGVSDDWKPPADPIYAPVGNPGVDRVLKIVNRLLMAAEREWGAPTQINIEHVRSGFSSELMQREFERENERRRAQNEEAVKAILTEKGGNSHVSKYDIIRYYAVKRQNCQCLYCGTPITFSDCELDHIVPRKGVGSTNSRVNLAAACRSCNRDKSNLPFAVWAGKTSNFDVSIDGAVSRVKQWQRSQNEGAREFRAFQNEVISRLLKTTEDPEIDSRSLESVAWMARELHHRVEYYFQSKGAQTQVSVYRGAVTAQARKSSGLEDKVKMIGGGGKTRLDRRHHAMDAATIALMTPGISTTLSEKNNLRDAQKFTGQSETWKDYCGRTETAREHFAVWKSNMERLTDLFNDKLENDAIPVVQPLRLRLSDSKAHDDGIGKLDSKKLGSVWSLADIDRAATPQIWTALTRCDDFDPTKGLPENANRVIRAQGVKYESEDNIPVFPSNVAAIAVRDGYAEIGSTIHHARIYRIDDGKKIFYSMIRVFAVDLLKHQAEDLFTVKLPPSAISIRTCEDSLRRALSNGTAEYLGWLVPGDEIIVDTSDKAFHTGQIGDLLRNFPVNSFRLTGFPSNSRLRLKPVLLAGEGLRDDAEDSIKKILSGQGWRPAINVLFSKGKPRIVRRNSLGIERPSSNNGLPFSWEA

SEQ ID NO: 185 - protein, 1054 aa, Staphylococcus lugdunensis
MNQKFILGLDIGITSVGYGLIDYETKNIIDAGVRLFPEANVENNEGRRSKRGSRRLKRRRIHRLERVKKLLEDYNLLDQSQIPQSTNPYAIRVKGLSEALSKDELVIALLHIAKRRGIHKIDVIDSNDDVGNELSTKEQLNKNSKLLKDKFVCQIQLERMNEGQVRGEKNRFKTADIIKEIIQLLNVQKNFHQLDENFINKYIELVEMRREYFEGPGKGSPYGWEGDPKAWYETLMGHCTYFPDELRSVKYAYSADLFNALNDLNNLVIQRDGLSKLEYHEKYHIIENVFKQKKKPTLKQIANEINVNPEDIKGYRITKSGKPQFTEFKLYHDLKSVLFDQSILENEDVLDQIAEILTIYQDKDSIKSKLTELDILLNEEDKENIAQLTGYTGTHRLSLKCIRLVLEEQWYSSRNQMEIFTHLNIKPKKINLTAANKIPKAMIDEFILSPVVKRTFGQAINLINKIIEKYGVPEDIIIELARENNSKDKQKFINEMQKKNENTRKRINEIIGKYGNQNAKRLVEKIRLHDEQEGKCLYSLESIPLEDLLNNPNHYEVDHIIPRSVSFDNSYHNKVLVKQSENSKKSNLTPYQYFNSGKSKLSYNQFKQHILNLSKSQDRISKKKKEYLLEERDINKFEVQKEFINRNLVDTRYATRELTNYLKAYFSANNMNVKVKTINGSFTDYLRKVWKFKKERNHGYKHHAEDALIIANADFLFKENKKLKAVNSVLEKPEIESKQLDIQVDSEDNYSEMFIIPKQVQDIKDFRNFKYSHRVDKKPNRQLINDTLYSTRKKDNSTYIVQTIKDIYAKDNTTLKKQFDKSPEKFLMYQHDPRTFEKLEVIMKQYANEKNPLAKYHEETGEYLTKYSKKNNGPIVKSLKYIGNKLGSHLDVTHQFKSSTKKLVKLSIKPYRFDVYLTDKGYKFITISYLDVLKKDNYYYIPEQKYDKLKLGKAIDKNAKFIASFYKNDLIKLDGEIYKIIGVNSDTRNMIELDLPDIRYKEYCELNNIKGEPRIKKTIGKKVNSIEKLTTDVLGNVFTNTQYTKPQLLFKRGN

SEQ ID NO: 186 - protein, 586 aa, Pseudoramibacter alactolyticus
MTYYLGLDMGTGSVGWAATDKNYKLIRAKGKDLWGVRLFQTAKTAAERRSHRVARLRRQREKVRIGYLKTIFSDAINKVDPGFFQRLDDSFFYAEDKNINQPYALFADTGYTDVDYYRDYPTIFHLRSTLIHDTSPKDVRLVYLAVLNMFKHRGHFLASNLSENGVDDFGDIYQQWCKSVPKPVQISDPEAKTEKIENILSKAGISNTRRLEALLEVFGIKRRDAFAEVLKLWCGLKGNLSKIWSETDFSDLDNTKPALSFKDSNLDMVLSQLEEILPDEDYSWLMLTKQIYDWSLLSGMMKDASGKSYDYLSDARVASYQKHSEDLKTLKRFYHDNHLSAAYDQMFRVMGKDNYSAYAGSVQSKKEVVRRGASCGIEELYKRIKKDLKPVPDCETKQIILENIERGTFLPKQLTRDNGVIPNQIHVHELKAILKNAENYLPFLKEGSELTNSEKILQLFQFQIPYYVGPLYSDENNYAWVVRKEGGRVFPWNFAEKVDEKASAEGFISELVARCTYLDNEKVLPKASLLYEKFMVLNELNNLRINGERISVDIKQELYQNLFTRGKKVTLKKSEGLFGGQRIFCL

SEQ ID NO: 187 - protein, 1385 aa, Gemella morbillorum
MKNKTWYLGLGVGPTSIGWAATDSNYKLLRKNKKRLWGVRLFEEAKTAVDRRTFRAERRRLARRKWRISLLEELFAKEVSKNDPNFFLRLKESKYHFEDKSLMNEYILFNDKDYTDKDYYKEYPTIYHLRLSLTTEENPDIRKVYLAVHSMLKNRGHFLLQGQSFNDSNIDSVIKELLELETVKINFEVTDEVIHSLKKIALEKKNLSDKNNDVKKLYPKEKQLQEIFKLVFGGKTSLDKLYDIEEYKELDNSVKSISFKEKVYEEVRPDYEQILSNYIELLDLAKLVYDSIVLADIKKEGKTISESKVELYNKHKDDLANLKKLVKIDSKLSEDKKKEVYFTIFKEDKEKGTNYVNYTHRSQEGKSCSYEDFKKFLKKELEKLEDSPTKTTILEELDLETFLPLQRTKDNSVVPYQIHKEELVKILDNAAKYHSFLAEKDDSGYSTREKVVQLFEFRIPYYIGPLNAHHNTENGGYSWAIRKKGMESVPVTPWNFKDVIDESASAEAFVNNLKNKCAYLSGEDVLPKNSLLYSEYALLNELNALRYEGNRISVEARDVIVTKLFKEQGKKVTKKTIKELLKTEGFIDGKGEIVGIDNIVKNDLKSYRDFKKILADKFDKERVENIILWITLYGESRKLIKEKITKVYGDFYTVDEIEKMSRLTYKDWGILSRKLLTELVSEKLYNEETGECLNIIGAMRQGTILFMELLADKFDYMSQIKNHNKENKDDITEITPDILENLHASPAVKRSIWQTVRIVEELKTIIGCVPTKIFIETTKRNNAPYKVPTLNRNDLVTKYKTIREHEIFELEKELKNTLDFTLNKNRLINEEPSKLKATKLYLYYTQLGRCMYTGKKIDLGELFDNNNKYDIDHIYPQSKVKDGSFNNIVLVTKASNDMKADVFPLKSKFQTKENKIFWRFLKEKKLITEEKYNRLVRTEEFSNGELTGFITRQLVETSQAIKVISNVLRELNPETTICYSKAENVSSFRQSFGKIKEANRKAENNEKLIRVQEINDYYNAKDAYLSIVVGNVYDVKFTRNVHNFIKNNKDARRYSLNGLFYTDVKNANTIAWEMDKTVHVVEKTMNNNNILITRRTSEQKGALYDATLYKAKVAEKAKEGTYYPLKTTDSKIKDVGKYGGFTKIKIAYYSIFEYTLDGKKGKQKITRIVPIPIYISQNIKDDKALLEYAQTRLPGKDLKIKYRKLCIGSLVKINNFNYYIGGKTNNNFTFDSAVQVILDKDSESYIKELAKYLNWKKENKDGKLWESITEDKNIQLYDSLVKKMNTGIFIRKTPNKYTELLTLEVKNKFINIDIDEQVKLLLEILNLLTNKKFTSKLNEIGITASRGVCSFNLSNQSQFSIIEQSVTGVYEKEKLIIEKKKEGIL

SEQ ID NO: 188 - protein, 1029 aa, Alicycliphilus denitrificans
MRSLRYRLALDLGSTSLGWALFRLDACNRPTAVIKAGVRIFSDGRNPKDGSSLAVTRRAARAMRRRRDRLLKRKTRMQAKLVEHGFFPADAGKRKALEQLNPYALRAKGLQEALLPGEFARALFHINQRRGFKSNRKTDKKDNDSGVLKKAIGQLRQQMAEQGSRTVGEYLWTRLQQGQGVRARYREKPYTTEEGKKRIDKSYDLYIDRAMIEQEFDALWAAQAAFNPTLFHEAARADLKDTLLHQRPLRPVKPGRCTLLPEEERAPLALPSTQRFRIHQEVNHLRLLDENLREVALTLAQRDAVVTALETKAKLSFEQIRKLLKLSGSVQFNLEDAKRTELKGNATSAALARKELFGAAWSGFDEALQDEIVWQLVTEEGEGALIAWLQTHTGVDEARAQAIVDVSLPEGYGNLSRKALARIVPALRAAVITYDKAVQAAGFDHHSQLGFEYDASEVEDLVHPETGEIRSVFKQLPYYGKALQRHVAFGSGKPEDPDEKRYGKIANPTVHIGLNQVRMVVNALIRRYGRPTEVVIELARDLKQSREQKVEAQRRQADNQRRNARIRRSIAEVLGIGEERVRGSDIQKWICWEELSFDAADRRCPYSGVQISAAMLLSDEVEVEHILPFSKTLDDSLNNRTVAMRQANRIKRNRTPWDARAEFEAQGWSYEDILQRAERMPLRKRYRFAPDGYERWLGDDKDFLARALNDTRYLSRVAAEYLRLVCPGTRVIPGQLTALLRGKFGLNDVLGLDGEKNRNDHRHHAVDACVIGVTDQGLMQRFATASAQARGDGLTRLVDGMPMPWPTYRDHVERAVRHIWVSHRPDHGFEGAMMEETSYGIRKDGSIKQRRKADGSAGREISNLIRIHEATQPLRHGVSADGQPLAYKGYVGGSNYCIEITVNDKGKWEGEVISTFRAYGVVRAGGMGRLRNPHEGQNGRKLIMRLVIGDSVRLEVDGAERTMRIVKISGSNGQIFMAPIHEANVDARNTDKQDAFTYTSKYAGSLQKAKTRRVTISPIGEVRDPGFKG

SEQ ID NO: 189 - protein, 1422 aa, Sutterella wadsworthensis
MTQSERRFSCSIGIDMGAKYTGVFYALFDREELPTNLNSKAMTLVMPETGPRYVQAQRTAVRHRLRGQKRYTLARKLAFLVVDDMIKKQEKRLTDEEWKRGREALSGLLKRRGYSRPNADGEDLTPLENVRADVFAAHPAFSTYFSEVRSLAEQWEEFTANISNVEKFLGDPNIPADKEFIEFAVAEGLIDKTEKKAYQSALSTLRANANVLTGLRQMGHKPRSEYFKAIEADLKKDSRLAKINEAFGGAERLARLLGNLSNLQLRAERWYFNAPDIMKDRGWEPDRFKKTLVRAFKFFHPAKDQNKQHLELIKQIENSEDIIETLCTLDPNRTIPPYEDQNNRRPPLDQTLLLSPEKLTRQYGEIWKTWSARLTSAEPTLAPAAEILERSTDRKSRVAVNGHEPLPTLAYQLSYALQRAFDRSKALDPYALRALAAGSKSNKLTSARTALENCIGGQNVKTFLDCARRYYREADDAKVGLWFDNADGLLERSDLHPPMKKKILPLLVANILQTDETTGQKFLDEIWRKQIKGRETVASRCARIETVRKSFGGGFNIAYNTAQYREVNKLPRNAQDKELLTIRDRVAETADFIAANLGLSDEQKRKFANPFSLAQFYTLIETEVSGFSATTLAVHLENAWRMTIKDAVINGETVRAAQCSRLPAETARPFDGLVRRLVDRQAWEIAKRVSTDIQSKVDFSNGIVDVSIFVEENKFEFSASVADLKKNKRVKDKMLSEAEKLETRWLIKNERIKKASRGTCPYTGDRLAEGGEIDHILPRSLIKDARGIVFNAEPNLIYASSRGNQLKKNQRYSLSDLKANYRNEIFKTSNIAAITAEIEDVVTKLQQTHRLKFFDLLNEHEQDCVRHALFLDDGSEARDAVLELLATQRRTRVNGTQIWMIKNLANKIREELQNWCKTTNNRLHFQAAATNVSDAKNLRLKLAQNQPDFEKPDIQPIASHSIDALCSFAVGSADAERDQNGFDYLDGKTVLGLYPQSCEVIHLQAKPQEEKSHFDSVAIFKEGIYAEQFLPIFTLNEKIWIGYETLNAKGERCGAIEVSGKQPKELLEMLAPFFNKPVGDLSAHATYRILKKPAYEFLAKAALQPLSAEEKRLAALLDALRYCTSRKSLMSLFMAANGKSLKKREDVLKPKLFQLKVELKGEKSFKLNGSLTLPVKQDWLRICDSPELADAFGKPCSADELTSKLARIWKRPVMRDLAHAPVRREFSLPAIDNPSGGFRIRRTNLFGNELYQVHAINAKKYRGFASAGSNVDWSKGILFNELQHENLTECGGRFITSADVTPMSEWRKVVAEDNLSIWIAPGTEGRRYVRVETTFIQASHWFEQSVENWAITSPLSLPASFKVDKPAEFQKAVGTELSELLGQPRSEIFIENVGNAKHIRFWYIVVSSNKKMNESYNNVSKS

SEQ ID NO: 190 - protein, 1132 aa, Nitratifractor salsuginis
MKKILGVDLGITSFGYAILQETGKDLYRCLDNSVVMRNNPYDEKSGESSQSIRSTQKSMRRLIEKRKKRIRCVAQTMERYGILDYSETMKINDPKNNPIKNRWQLRAVDAWKRPLSPQELFAIFAHMAKHRGYKSIATEDLIYELELELGLNDPEKESEKKADERRQVYNALRHLEELRKKYGGETIAQTIHRAVEAGDLRSYRNHDDYEKMIRREDIEEEIEKVLLRQAELGALGLPEEQVSELIDELKACITDQEMPTIDESLFGKCTFYKDELAAPAYSYLYDLYRLYKKLADLNIDGYEVTQEDREKVIEWVEKKIAQGKNLKKITHKDLRKILGLAPEQKIFGVEDERIVKGKKEPRTFVPFFFLADIAKFKELFASIQKHPDALQIFRELAEILQRSKTPQEALDRLRALMAGKGIDTDDRELLELFKNKRSGTRELSHRYILEALPLFLEGYDEKEVQRILGFDDREDYSRYPKSLRHLHLREGNLFEKEENPINNHAVKSLASWALGLIADLSWRYGPFDEIILETTRDALPEKIRKEIDKAMREREKALDKIIGKYKKEFPSIDKRLARKIQLWERQKGLDLYSGKVINLSQLLDGSADIEHIVPQSLGGLSTDYNTIVTLKSVNAAKGNRLPGDWLAGNPDYRERIGMLSEKGLIDWKKRKNLLAQSLDEIYTENTHSKGIRATSYLEALVAQVLKRYYPFPDPELRKNGIGVRMIPGKVTSKTRSLLGIKSKSRETNFHHAEDALILSTLTRGWQNRLHRMLRDNYGKSEAELKELWKKYMPHIEGLTLADYIDEAFRRFMSKGEESLFYRDMFDTIRSISYWVDKKPLSASSHKETVYSSRHEVPTLRKNILEAFDSLNVIKDRHKLTTEEFMKRYDKEIRQKLWLHRIGNTNDESYRAVEERATQIAQILTRYQLMDAQNDKEIDEKFQQALKELITSPIEVTGKLLRKMRFVYDKLNAMQIDRGLVETDKNMLGIHISKGPNEKLIFRRMDVNNAHELQKERSGILCYLNEMLFIFNKKGLIHYGCLRSYLEKGQGSKYIALFNPRFPANPKAQPSKFTSDSKIKQVGIGSATGIIKAHLDLDGHVRSYEVFGTLPEGSIEWFKEESGYGRVEDDPHH

SEQ ID NO: 191 - protein, 1327 aa, Solobacterium moorei
MEGQMKNNGNNLQQGNYYLGLDVGTSSVGWAVTDTDYNVLKFRGKSMWGARLFDEASTAEERRTHRGNRRRLARRKYRLLLLEQLFEKEIRKIDDNFFVRLHESNLWADDKSKPSKFLLFNDTNFTDKDYLKKYPTIYHLRSDLIHNSTEHDIRLVFLALHHLIKYRGHFIYDNSANGDVKTLDEAVSDFEEYLNENDIEFNIENKKEFINVLSDKHLTKKEKKISLKKLYGDITDSENINISVLIEMLSGSSISLSNLFKDIEFDGKQNLSLDSDIEETLNDVVDILGDNIDLLIHAKEVYDIAVLTSSLGKHKYLCDAKVELFEKNKKDLMILKKYIKKNHPEDYKKIFSSPTEKKNYAAYSQTNSKNVCSQEEFCLFIKPYIRDMVKSENEDEVRIAKEVEDKSFLTKLKGTNNSVVPYQIHERELNQILKNIVAYLPFMNDEQEDISVVDKIKLIFKFKIPYYVGPLNTKSTRSWVYRSDEKIYPWNFSNVIDLDKTAHEFMNRLIGRCTYTNDPVLPMDSLLYSKYNVLNEINPIKVNGKAIPVEVKQAIYTDLFENSKKKVTRKSIYIYLLKNGYIEKEDIVSGIDIEIKSKLKSHHDFTQIVQENKCTPEEIERIIKGILVYSDDKSMLRRWLKNNIKGLSENDVKYLAKLNYKEWGRLSKTLLTDIYTINPEDGEACSILDIMWNTNATLMEILSNEKYQFKQNIENYKAENYDEKQNLHEELDDMYISPAARRSIWQALRIVDEIVDIKKSAPKKIFIEMAREKKSAMKKKRTESRKDTLLELYKSCKSQADGFYDEELFEKLSNESNSRLRRDQLYLYYTQMGRSMYTGKRIDFDKLINDKNTYDIDHIYPRSKIKDDSITNRVLVEKDINGEKTDIYPISEDIRQKMQPFWKILKEKGLINEEKYKRLTRNYELTDEELSSFVARQLVETQQSTKALATLLKKEYPSAKIVYSKAGNVSEFRNRKDKELPKFREINDLHHAKDAYLNIVVGNVYDTKFTEKFFNNIRNENYSLKRVFDFSVPGAWDAKGSTFNTIKKYMAKNNPIIAFAPYEVKGELFDQQIVPKGKGQFPIKQGKDIEKYGGYNKLSSAFLFAVEYKGKKARERSLETVYIKDVELYLQDPIKYCESVLGLKEPQIIKPKILMGSLFSINNKKLVVTGRSGKQYVCHHIYQLSINDEDSQYLKNIAKYLQEEPDGNIERQNILNITSVNNIKLFDVLCTKFNSNTYEIILNSLKNDVNEGREKFSELDILEQCNILLQLLKAFKCNRESSNLEKLNNKKQAGVIVIPHLFTKCSVFKVIHQSITGLFEKEMDLLK

SEQ ID NO: 192 - protein, 738 aa, Treponema phagedenis
MLQELFAKEIAKIDEGFFRRLDESAFYLEDKSLKQKYSLFNDDNFTDKDYYKKFPTIHHLIKALINDETHVDIRLLYLACHTIIKNRGHFLFEGKEFNTESRFDDAINELFSYLRQDMEIDFAFEDKIADIKEILENKKIGMRDKQNALNKKLSIAPKDKQKKEIIKLIVGASFNLKTLFNDEKYSSEKESYSFAKSNYEEKEAVLESLLGDGFGLILRAKAVYDSSVLSEILGNETYLSFAKVKIYDKHKEDLAKLKKVIKTYHADEFKKVFAEANIQGNYCSYVGSCKKNGKKVPIEKRADKDAFYDFLKKILKDEKAKNSDADYAFILNEIELKTFLPKQVSKKNANIPYQLRRMELEKIVNNAEKYFSFLSEKDEYGTVKEKIIQLLTFKRPYYIGIIQDTHKEKFPDRCWVVKKENAKNEKITPWNFYDHIDEDKTAEAFITSRTNKCTYLIGEDVLPRNSLLYMEYTVLNELNNLKVSVDGVNIFDVKLKKKIYEQVFKQRKEVSKKTIADFLKKEGICKKENDVVITGIDEKCTTSLKLYIDIKKIIGKRIEEEPTKNALEDIILWASIYDEGEGRKILEAKIQSVYPDVFTQDELNKILKLKISGWGRFSRKFLESIVASFPGFTDTINIITAMRETNFNLMELLGDAYGFSKGIEKFNSKFNDDKKVFSYDKLVKDLYLSPSVKRMLWRALVIVKEVKSIMGKDPKKYLLKWQEEKKLKREGLPPAMQV

SEQ ID NO: 193 - protein, 1377 aa, Streptococcus equinus
MEKTYSIGLDIGTNSVGWAVITDDYKVPAKKMKVLGNTDKKYIKKNLLGALLFDSGETAEATRLKRAARRRYTRRKNRLRYLQEIFAKEMAKVDESFFQRLEESFLTDDDKTFDSHPIFGNKAEEDTYHQEFPTIYHLRKHLADSPEKVDLRLVYLALAHMIKFRGHFLIEGQLNAENTDVQKIFADFVGVYDRTFDDSHLSEITVDAASILTEKISKSRRLENLIKQYPTEKKNTLFGNLVALALGLQPNFKTNFKLSEDAKLQFSKDTYDEDLEELLGKIGDDYADLFTAAKNLYDAILLSGILTVDDNSTKAPLSASMIKRYEEHHEDLEKLKTFIKVNNFDKYHEIFKDKSKNGYAGYIENGVKQDIFYKHLKSIISEKNGGQYFLDKIEREDFLRKQRTFDNGSIPYQIHLQEMRTILRRQGEYYPFLKENQAKIEKILTFRIPYYVGPLARKNSRFAWAKYHSDEPITPWNFDEVVDKEKSAEKFITRMTLNDLYLPEEKVLPKHSYVYETFAVYNELTKIKYVNEQGKSFFFDANMKQEIFDHVFKENRKVTKAKLLSYLNNEFEEFRINDLIGLDKDSKSFNASLGTYHDLKKILDKSFLDDKTNEQIIEDIVLTLTLFEDRDMIHERLQKYSDIFTSQQLKKLERRHYTGWGRLSYKLINGIRNKENNKTILDFLIDDGDANRNFMQLINDDSLSFKTTIQEAQVVGDVDDIEAVVHDLPGSPAIKKGILQSVKIVDELVKVMGHNPQNIVIEMARENQITGYGRNRSNQRLKRLQDSLKEFGSDILSKKKPSYVDSKVENSHLQNDRLFLYYIQNGKDMYTGEELDIDHLSDYDIDHIIPQAFIKDNSIDNRVLTSSAKNRGKSDDVPSIEIVRNRKSYWYKLYKSGLISKRKFDNLTKAERGGLTETDKAGFIKRQLVETRQITKHVAQILDARFNTKCDENDKVIRDVKVITLKSSLVSQFRKEFKFYKVREINDYHHAHDAYLNAVVGTALLKKYPKLAPEFVYGEYKKYDVRKLVAKSSDNHSELGKATAKYFFYSNLMNFFKTEVKYADGRVFERPDIETNADGEVVWNKQRDFNIVRKVLSYPQVNIVKKVEVQTGGFSKESILPKGDSDKLIPRKTKKLQWETQKYGGFDSPTVAYSVLVVADVEKGKTRKLKTVKELVGISIMERSSFEENPVSFLEKKGYHNVQEDKLIKLPKYSLFEFEGGRRRLLASATELQKGNEVVLPQYMVNLLYHSQHVNNSHKPEHLNYVKQHKDEFKDIFNLIISIARINILKPKVVDNLINEFTEYGQEDISSLSESFINLLKFISFGAPGAFKFLKLDVKQSNLRYKSTTEALSATLIHQSVTGLYETRIDLSKLGEE

SEQ ID NO: 194 - protein, 1128 aa, Streptococcus vestibularis
MSDLVLGLDIGIGSVGVGILNKVTGEIIHKNSRIFPAAQAENNVERRTNRQGRRLTRRKKHRRVRLNHLFEESGLITDFTKVSINLNPYQLRVKGLIDELSNEELFIALKNMVKHRGISYLDDASDDGNSSVGDYAQIVKENSKQLETKTPGQIQLERYQKYGQLRGDFTVEEDGKKHRLINVFPTSAYRSEALRILQTQKEFNPQITDEFINRYLEILTGKRKYYHGPGNEKSRTDYGRYTTKKDSENEYITLDNIFGILIGKCTFYPEEYRAAKASYTAQEFNLLNDLNNLTVPTETKKLSEEQKNQIINYVKNEKAMGPAKLFKYIAKLLSCDVADIKGYRIDKSDKAEIHTFEAYRKMKTLETIDFEKMSRDQLDKLAYVLTLNTEREGIQEALDHEFADGNFSQEQIDELVQFRKANSSIFGKGWHNFSVKLMMELIPELYATSEEQMTILTRLGKQKTTSSSNKTKYIDEKLLTEEIYNPVVAKSVRQAIKIVNAAIKEYGDFDNIVIEMARETNEDDEKKAIQKIQKANKDEKDAAMLKAANQYNGRAELPHSVFHGHKQLATKIRLWHQQGERCLYTGKTISIHDLINNPNQFEIDHILPLSITFDDSLANKVLVYATANQEKGQRTPYQALDSMDDAWSFRELKAFVRESKSLSNKKKEYLLTEEDISRFDVRKKFIERNLVDTRYASRVVLNALQEHFRAHKTDTKVSVVRGQFTSQLRRHWGIEKTRDTYHHHAVDALIIAASSQLNLWKKQKNTLVNYSENQLLDIETGELISDDEYKESVFKAPYQHFVDTLKSKEFEDSILFSYQVDSKFNRKISDATIYATRQAKVGKDKKDETYVLGKIKDIYSQTGYDAFIKIYQKDKSKFLMYRHDPQTFEKVIEPILENYPNKEMNEKGKEVPCNPFLKYKEEHGDYIRKYSKKGNGPEIKSLKYYDSKLGNHIDITPKDSNNKVVLQSVSPWRADVYFNKTTGKYEILGLKYADLQFEKGTGTYKISQEKYNVIKKKEGVDSDSEFKFTLYKNDLLLIKDTETKEQQLFRFLSRTKPNVKHYVELKPYDKQKFEGNESLINVLGAVAKGGQCQKGINKPNISIYKVRTDVLGNQHIIKNEGDKPKLDF

SEQ ID NO: 195 - protein, 1080 aa, Methylocystis sp.
MRVLGLDGGIASIGWALIEIFEDHEPSDGRIIDTGAWMFDAPEEKSQTGTKLKSELRRIFRGQRRVIRRRRQRMNEVRRILHRHGLLSSDNRDALKQPGLDPWKIRAEGIDRLLSPIEFAVALGHIARHRGFKSNSKGAKTSDLDAESSRMKKAVGETREKLARFGSPAKLLVEDEGFVLRQTKLKSGALETVRRFRNRDGDYSRSLLRDDLAAEVRALFRAQARLQSTFAKVELEAEFTQAAFFQRPLQDSERLVGPCPFEPAEKRSPKRGYSFELFRFLSRLNHLTLREGSEERTLTVEELRTAAADFGGVAKFTFSTLRKRLALPDIAIFVGIKADDEKKLDVVARSGEAATGTARLRRVVIDALGELAWGALISAPERLDKITEIITFRSDLDRIRAGLIEAGFDTPLIEAIVRAAADGKLDAFTGVGHISAKAARNIIPGLMRGMTYDKACAAAGYDHTASRERDAFDVGMHGKEALKKILQEERISRELVGSPSARKALIEAVKQVKAIIEKYGVPDRIHVELARDVGKSIEERRDIHFGIEKRSRQKDKLRELFGKEVGHLPQDGERGKEELLRFELWNEQMGRCLYTDEYINPKQLVASDNSVQVDHILPWSRFGDDSYLNKTLCTAKANQDKKGRTPYEWFRADKPEAEWDAFVARVESIQFMKGLKKRNYKLKNAEEAAEKFRSRNLNDTRWTCRLLAEALKQLYPKGEKDKDGKERRRVFTRPGALTNRLRRAWSLQRRKKSEKGERIADDRHHALDAIIVAATTESLLIRATREVQDIERKGLHYDLTKNITQPWPGFADEALDAVEKVFVARAERRRARGKAHDATIRHIAVRDDEAKVYERKKVGDIKLGDLIRVKDAERNAPLIENLRKWIEAGSPRDNPPLSPKGDPVSKVRLVTKNKVNITLDTGNPERLATVDRGEMARVDVFRKANRKGKYEYYLVPIYPHEIATMETPPMRAVQGGGDDDKWPEIDSTFEFLWSINQLSLLELTKPDGEVIRSYFRSLDRNTGALTVSGIANSTATRKGIGTRTLIDFKKLHVDRLGQIFEVERELRTWRGETWRGKDCI

SEQ ID NO: 196 - protein, 1087 aa, Phascolarctobacterium succinatutens
MLRMKYAIGLDIGIASVGYAVLALDHEENPWGIIRLGSRIFDVAENPKDGASLALPRREARSVRRRLRRHHHRLERIKNLLINTEFITKDELLHLYDGNLSDVYELRVKALDYSVTNAELTRILLHLAQRRGFKSNRKSDANDKEAGQLLEAVSANAKRMQENHYRTVGEMFYKDDLFSKYKRNKGGTYLTTVHRDMIAAEARTILEKQFALGNNICTQDFIDKYLSILLSQRQFDEGPGEPSPYAGNQIANMIGKCTFEPNEYRAAKASYSFERFNLLQKVNHLRLLLEGKSIALDNEQRKKIIALAHDKADLRYSHIRKALGLDEKVLFNTITYNDDVSVIEKKTKFNFLQAYHQIKKVLAEDMQKLTTEQLDNIGQILSTYKSDNKRTEELSALGLEKKIIDALLGINGLSKFAHLSLKALRKINPYLEEGKIYNEACTAAGYDFKAHANTQKTELLPAYKEEMDDITSPVARRAIAQSIKVINAIIREQKGSPLYINIELAREMAKGFDERTQIDKANKENQAKNERIMERIRTEFHKANPTGMDLIKLKLWEEQDGRSPYSQKAISINRLFEPGYVDIDHIVPYSISFDDSFKNKVLVFSDENRDKGNRLPIAYLQSKFGAKAAENFMIWVQSNIKDYKKRQKLLKREITEEDINKFKERNLQDTKTISRFLYNYINDYLLFAPSDTGKKKRVTAVNGTITAYLRKRWGINKIRANGDKHHAVDAVVIACTTDKMIKDLSSFSRYHELEYTHTDTESFLVNSLTGEILKRFPYPWEDFRPELMARLSDNPADALRKLNLIFYHGIDLSTIKPIFVSRMPRHKVTGAAHKATIKSARCLDNGIVICKTSLQNLKLDKEGEIANYYAPESDTILYNALKERLRSYDNKPAKAFAEPFYKPKADGTPGPLVKKVKVYEKSTLNVAVQQNTAVADNDSMVRVDVFHVKGNGYYLVPIYIADTLKKELPNKAIVAYKPYADWPVMDDSNFIFSLYPNDLIKFEHKNSVKFAKVNKESTLNDFYSTKSEIVYFKGCNINTGAITIINHENTYVVSSLGVKTLPSLEKYQADVLGNYTKVKKEVRKPFR

SEQ ID NO: 197 - protein, 1375 aa, Lactobacillus ruminis
MRKNQEPYNIGLDIGTSSIGWSIMNDNFDLMRVKGKKGIGVRLYNEGQSAAERRMHRTARRRYGRRKWRLRLLEDFFDEHMAEVDDTFFARLKDSNISPKDDKKYRKSLLFPKSKGVTYQDDGEFYKKYPTMYHLRYALMTEHRKFDLREIYLAFHHMVKYRGNFLYDTSVDSFEAKNLDIKGKFDEINDLLSSYTDFYVDNSNAALVESILLEKNTTRKDKSKKIAKLLHVEDKEKGKNKKAKDLATQISNAVLGLKCNFHLIFELQQKYSFDLCSEKTEENIAKLSEVLDENQKMLLMILKEVQDQVMLNAFVPSGMSLSEAMMQKYDDYGEQLKIYHELEHSVSDDSAAKLRGAYRDYNDNIIKRIDGDNKKDTFYKRVKNILTKISKEYVDQDVLESCGKLKKLIDENKLFIRQRTAANGVLPHQLHQIEMRKIIDNQKEYYPWLAEPNPNEKRRVYSKYKVEELIAFRIPYYVGPLVDPNNADKNKEARFSWMVRKKDGEITPWNFYDKVDWAESANNFIERMKSKDTYLLGEDVVPKESMLYQKYEVLNELNNLRINDSGLSDSFEDVKLKQAIYNDLFKKQKIVKITDLQNYLVQNHKYLVKPKISGLADENRFLSSLSTYSDLKTIFGDKVDDRTYFNDFEKMVEYSTVFEDGHDYNQKLDEYTWLTKEEKYKIGKKRYRGWGKLSKKLLTGLRDKNNHTIMDNLWETNRNFMQIQTADEFSKQIAEENERHLKGSVSDAINDMYTSPANKKAIRQVLRVVDDIQKAMGYAPSSISLEFAREDGPSVRTVSRANRMKSIYEKYASEVSEEVMKDLDGVIKDKKGLNDRLYLYFEQQGKDMYSGHPLDFDKVISGQEYDIDHILPQAVIKDDSLDNRVLTTKALNNDVKSKGVPCRMFNGMHSFWKNLYDKGFISRRKFNNLTTNPENIDKYKMKGFVNRQLVETRQIIKLVANVLNDKYQNDDVDIIEVRAELTHDVRKHFKFYKNRNVNDYHHAFDAYLTSFIGHYLFKKYPNLRPLFDYNDFMKVSDNVFKQLRGNNFLGEFLNKTGDIISTDGNFVLNKEEMINKLNKAYAFKKILVTKEVGQRTGAMFNETRYPAPNSRKAALKYRRMPKPDSLISVKDYKNTDIYGGYSGKNDAYMVIVDMGKQYMVVGVPVRYTEKLDKLRIKHSELYRDELRKVLSRDKTLLDSKGNVKRFDIVLDRVLYGQLIEDGNELFTLGSSKYKRNFRQLFLDKQCIEILDSSATPQPTDEELIWVYDQILDKVDKYFELYDINRQRETLRKGRAAFCSLPNISMKKDDVTKKKILNEILVALHANESESNCEKIGKKVFGRLQVPGGIKLSKEAKLIYQSPTGLFERVVYLKDL

SEQ ID NO: 198 - protein, 1391 aa, Prevotella oralis
MKKILGLDLGTTSIGWALVNEKENNEELSSIIRLGVRVNPLTVDEKSNFEKGKDITTNADRTKCRSARRNLQRFKLRREALADCLKRHGLMTDETPLCETNNSIIFKTYSNRAKAVCEKIALDDFVRVLFMINKKRGYKSSRKLNTDDEGTLVDGMDVAKLLYNEQITPGEYLLRLFKKGKKTRPDFYLSDLKAELERIWDFQRTFYPEILCNALKEDLKGKSRTQSSAIFYAKYKVSTAKIAGKDKRLQELTWRTDALRKQLTIDEVAYVICSINGEVNGSSQRLSMISDRSKLLYFNHQTIGQYLMQRLEENPNAGLKNIIFYRQDYEDEFNDIWNSQATYHKELTPELKKEVKDIIFYQRGLKSCKWLINYCELEHEEIEVKTPEGKLRKITIGSKTCPKSSPLFQEFKIWQVLNNLQVSPLNSRRKAKRKKDEEPSLFSDEDMNTACRYLNEEEKLTLFKELSIKKELKKKDALKLLFENYKELDLNYKVISGNVTMANLYRAFQDIISLTGNGEFDFQAMPAEEAEKTVEEIFGGLGYKTAFLHFDASLHDKEFERQPAYRLWHLLYSYAGDQSKTGIEALVKRIQELCGFEPEYARILANISFIPDYGNLSSKAMRKILPYMQDGYEYSEACSKAGYRHSASSLTKEEINKKNYKTHLDEIKRNSLRNPIVEKILNQMVNVVNSVIDTYSNIDEIRIEMARELKKSKPEREDMSFAISKATKETERIKGILEQEFKIQHVTRNDIIRYRLYEELKPNGYKTLYSNTYIPREDLFSKKFDIEHIIPKARLFDDSYSNKTLELRDINIEKGNQTAYDFVLSKYGEEGLYKYEQRVEEFKKNNEQAGTKCRKLLMREADIPSDFLNRDLNDSQYIAKKAHELLREIVPTVTATTGSITNRLREDWKLVNVMKELNWEKYDKLGLTEEYKDKDGNTVRHIKDWTKRNDHRHHAMDALTIAFTKPSFIQYLNNLNARSNRGGSIYGIEQKELERENNKLVFIPPIDPKIFRKQAKEHLSNILISIKAKNKVVTKNVNKTKSKSGTNRKVQLTPRGQLHLETVYGKIRTYKTEEIKVGTKLTEELIAKVADKKIREALMQRLSEYGGNIKKAFQNISKHPIWLNGSHTKHVPEKVKIVFFEDVFTIRKAITPDIKIDKVIDSKIRRILQERLNEFGGEASKAFSNLDENPIWFNRDKGIAIKSVKIRGIAKGTAIRVKKDIHGKTIIGNNGYPVANDYVNTGNNHHVAIFRDKDGNLQEHIVSFYEATARAIQNLPIVDRNYNSEKDWKFLFSMKQNEYFVFPNPNTGFNPSEISLKDEKNYALISPNLFRVQKLSHYYYVFRHHLETNVDTNLQLKDITWKRITAVNNLTGAVKVRIDHLGRIVDVGEYK

SEQ ID NO: 199 - protein, 1167 aa, Streptococcus sanguinis
MLFGLKTKFKDCFELEEEPDLNFSKENYDDNLEKLLGELGEDFSDVFDKLKILRDTILLSGMLTYTGATHARFSATMVERYEEHRKDLQRFKSFIKQNLSEQDYLDIFGRKTQNGFDVDKETKGYVGYITNKMVLTNPQKQKTIQQNFYDYISGKITGIEGSEYFLNKISDRTFLRKLRTSDNGAIPNQIHAYELEKIIERQGKDYPFLLENKDKLLSILTFKIPYYVGPLAKGNNSRFAWIKRANSSDILDDNDEDTRNGKIRPWNYHKLINMDETRDAFITNLIGNDTILLNEKVLPKRSLIYEEVMLQNELTRVKYKDKYGKAHFFDSEHRQNIINGLFKINSKRVNAERLIKYLSDNHKDLNAIEIVSGVEKGKSFNSTLKTYNDFKTIFSEEFLDSEIYQKELEEIIKVITVFDDKKSIKNYLTKYFGHLEFLDEEKINQLSKLRYTGWGRYSAKLLLDIRDEDTGFNLLQFLRNDEENRNLTNLISDNTLSFDPKIKAIQSKSTVEDDVFDEIKKLAGSPAIKRGILNSIKIVDELVQIIGYPPQNIVIEMARENMTTEEGQKKTKTRKSKLESALKNIENSVLENGKVLHSDEQLQSEKLYLYYLQNGKDIYSLDETGSPAPIYLDQLDQYEVDHIIPYSFLPIDSIDNKVLTHRKNNQRKLDNIPDKETVAHMKPFWEALYNAKLISQTKYQRLTTSERTPDGVLTESMKAGFIERQLVETRQIIKHVARILDNRFSDTKIITLKSQLVTNFRNTFHIAKIRELNDYHHAHDAYLAVVVGQTLLKAYPKLAPELIYGHHVHFNRHEENKATLRKHLYSNIMRFFNNPDSKVSKDIWDCNRDLPIIKHVIYNSQINFVKRTMIKKGAFYNQNPVGKFNKQLAANNRYPLKTKALCLDTSIYGGYGPMNSTLSIIIIAERFNEKKGKIETVKEFHDIFIIDYEKFNNNPFQFLNDTSENGFLKKNNINRVLGFYRIPKYSLMQKIDGTRMLFESKLNLHKATQFKLTKTQNELFFHMKRLLTNSNLMDLKSESAIKESQNFILKHKEEFDNISNQLSAFSQKMLGNTTSLKNLIKGYNERKIKEIDIREETIKYFYDNFIKMFSFVKSGAPKDINDFFDNKYTVARMRPKPDKRLLNATLIHQSITGLYETRIDLSKLGED

SEQ ID NO: 200 - protein, 1334 aa, Staphylococcus pseudintermedius
MGRKPYILSLDIGTGSVGYACMDKGFNVLKYHDKDALGVYLFDGALTAQERRQFRTSRRRKNRRIKRLGLLQELLAPLVQNPNFYQFQRQFAWKNDNMDFKNKSLSEVLSFLGYESKKYPTIYHLQEALLLKDEKFDPELIYMALYHLVKYRGHFLFDHLKIENLTNNDNMHDFVELIETYENLNNIKLNLDYEKTKVIYEILKDNEMTKNDRAKRVKNMEKKLEQFSIMLLGLKFNEGKLFNHADNAEELKGANQSHTFADNYEENLTPFLTVEQSEFIERANKIYLSLTLQDILKGKKSMAMSKVAAYDKFRNELKQVKDIVYKADSTRTQFKKIFVSSKKSLKQYDATPNDQTFSSLCLFDQYLIRPKKQYSLLIKELKKIIPQDSELYFEAENDTLLKVLNTTDNASIPMQINLYEAETILRNQQKYHAEITDEMIEKVLSLIQFRIPYYVGPLVNDHTASKFGWMERKSNESIKPWNFDEVVDRSKSATQFIRRMTNKCSYLINEDVLPKNSLLYQEMEVLNELNATQIRLQTDPKNRKYRMMPQIKLFAVEHIFKKYKTVSHSKFLEIMLNSNHRENFMNHGEKLSIFGTQDDKKFASKLSSYQDMTKIFGDIEGKRAQIEEIIQWITIFEDKKILVQKLKECYPELTSKQINQLKKLNYSGWGRLSEKLLTHAYQGHSIIELLRHSDENFMEILTNDVYGFQNFIKEENQVQSNKIQHQDIANLTTSPALKKGIWSTIKLVRELTSIFGEPEKIIMEFATEDQQKGKKQKSRKQLWDDNIKKNKLKSVDEYKYIIDVANKLNNEQLQQEKLWLYLSQNGKCMYSGQSIDLDALLSPNATKHYEVDHIFPRSFIKDDSIDNKVLVIKKMNQTKGDQVPLQFIQQPYERIAYWKSLNKAGLISDSKLHKLMKPEFTAMDKEGFIQRQLVETRQISVHVRDFLKEEYPNTKVIPMKAKMVSEFRKKFDIPKIRQMNDAHHAIDAYLNGVVYHGAQLAYPNVDLFDFNFKWEKVREKWKALGEFNTKQKSRELFFFKKLEKMEVSQGERLISKIKLDMNHFKINYSRKLANIPQQFYNQTAVSPKTAELKYESNKSNEVVYKGLTPYQTYVVAIKSVNKKGKEKMEYQMIDHYVFDFYKFQNGNEKELALYLAQRENKDEVLDAQIVYSLNKGDLLYINNHPCYFVSRKEVINAKQFELTVEQQLSLYNVMNNKETNVEKLLIEYDFIAEKVINEYHHYLNSKLKEKRVRTFFSESNQTHEDFIKALDELFKVVTASATRSDKIGSRKNSMTHRAFLGKGKDVKIAYTSISGLKTTKPKSLFKLAESRNEL

SEQ ID NO: 201 - protein, 1156 aa, Ruminococcus albus
MGNYYLGLDVGIGSIGWAVINIEKKRIEDFNVRIFKSGEIQEKNRNSRASQQCRRSRGLRRLYRRKSHRKLRLKNYLSIIGLTTSEKIDYYYETADNNVIQLRNKGLSEKLTPEEIAACLIHICNNRGYKDFYEVNVEDIEDPDERNEYKEEHDSIVLISNLMNEGGYCTPAEMICNCREFDEPNSVYRKFHNSAASKNHYLITRHMLVKEVDLILENQSKYYGILDDKTIAKIKDIIFAQRDFEIGPGKNERFRRFTGYLDSIGKCQFFKDQERGSRFTVIADIYAFVNVLSQYTYTNNRGESVFDTSFANDLINSALKNGSMDKRELKAIAKSYHIDISDKNSDTSLTKCFKYIKVVKPLFEKYGYDWDKLIENYTDTDNNVLNRIGIVLSQAQTPKRRREKLKALNIGLDDGLINELTKLKLSGTANVSYKYMQGSIEAFCEGDLYGKYQAKFNKEIPDIDENAKPQKLPPFKNEDDCEFFKNPVVFRSINETRKLINAIIDKYGYPAAVNIETADELNKTFEDRAIDTKRNNDNQKENDRIVKEIIECIKCDEVHARHLIEKYKLWEAQEGKCLYSGETITKEDMLRDKDKLFEVDHIVPYSLILDNTINNKALVYAEENQKKGQRTPLMYMNEAQAADYRVRVNTMFKSKKCSKKKYQYLMLPDLNDQELLGGWRSRNLNDTRYICKYLVNYLRKNLRFDRSYESSDEDDLKIRDHYRVFPVKSRFTSMFRRWWLNEKTWGRYDKAELKKLTYLDHAADAIIIANCRPEYVVLAGEKLKLNKMYHQAGKRITPEYEQSKKACIDNLYKLFRMDRRTAEKLLSGHGRLTPIIPNLSEEVDKRLWDKNIYEQFWKDDKDKKSCEELYRENVASLYKGDPKFASSLSMPVISLKPDHKYRGTITGEEAIRVKEIDGKLIKLKRKSISEITAESINSIYTDDKILIDSLKTIFEQADYKDVGDYLKKTNQHFFTTSSGKRVNKVTVIEKVPSRWLRKEIDDNNFSLLNDSSYYCIELYKDSKGDNNLQGIAMSDIVHDRKTKKLYLKPDFNYPDDYYTHVMYIFPGDYLRIKSTSKKSGEQLKFEGYFISVKNVNENSFRFISDNKPCAKDKRVSITKKDIVIKLAVDLMGKVQGENNGKGISCGEPLSLLKEKN

SEQ ID NO: 202 - protein, 1440 aa, Weeksella virosa
MKTILGLDLGTNSIGWALVEQDFENKQGLILGMGSRIIPMDAGIIGKFAEGSSISQTAERTGYRSIRRLRERHLLRRERLHRVLNILKFLPEHYAAEIDFEKRFGQFLAETEPKLAWKKNAEGKFEFLFQRSFDEMVADFKANGQDIKIPYDWTIYYLRKKALTQKISPQELAWIILNFNQKRGYYQLRGEEEEENPNKKVEFYSLKIVDVVADEQPNKKGDTWYSLHLENGWVYRRSSKIPLYDWKDKVRDFIVTTDINEDGSEKLDKDGEVKRSFRAPKEDDWTLIKKKTEQEIEQFNQTVGSYIYEALLDNPTQKIRGKLVRTIERKFYKSELKKILEKQIELQPELFTEDLYNACARELYRRNVAHQQQLSSRDFVYLFLNDIIFYQRPLRSQKSLISNCSLEFRTIKDKDGNGQIIYLKAIPKSNPYYQEFRVWQWLYNLKIFTKEDDKDVTNQFINKVEDLEALFEFLMNQKEVNHTDILTYLIEPIVKSKYPNAKGKAFKDELKKELKKYRWNYVYDADKDESKSYPMNETRYELRKRLDKVENVPADFMTRKIEQHLWHIIYSVTDKIEFEKALKSFANKYDLHQESFVENFKRFKPFDSDYGTYSEKAIKKLLPLMRVGKYWSWDIIDDKTKTRIGKIITGEYDETIKNRVREKAIDLTEENHFQGLQLWLAQYIVYDRHSEADIAGKWNSVADLEQYLSEFKQHSLRNPIVEQVITETLRVVRDIWKQYGKGAKDYFDEIHIELGREMKNTAEERKRLSSIISENETTNLRIRAILEELMYDENMENVRPYSPMQQEALKIYEDGVLSSSVEIPEDIEKISKKSEPTKSEIQRYKLWLEQKYRSPYTGRPIPLSKLFTPAYQIEHIIPQARFFDDGFSNKVICESEVNALKDKMLGLEFIQNYYGQKVTTSFGEVTILTEDAYKAFVKEHYDKNRSKRNKLLLEEIPEKMIDRQMNDTRYISKYISKVLSNLVRGEKDDEGVNSKNIIPGNGKITGILKQDWGLNDVWNDLILPRFERMNQLTNSTDFTAWNEKHQKFLPSVPLELSKGFQKKRIDHRHHALDALIIACATRDHVNLLNNKHAKSRNERYDLQHKLRHTTPWQDKEGKVRTKFTEFKKPWETFTQDTKKELEKIVVNFKQNLRVINKATNYYEKIVDGKKVMFKQEGVNWAIRKPMHKETVSGKIDLPRVKVSKGKILTATRKSLDTSFNAKTILSITDTGIQKILLNYLKAKGNPELAFSPEGIEEMNQNISLYNDGKPHQPILKVRVFEQGSKFPLGETGNKTTKYVEAAKGTNLFFGVYEDNQGKRSYDTIPLNIVIERQKQGLNSVPETNEKGHRLLFSLSPNDLVYVPIEGEVFDETNPDVNRIYKVVSFSGSQMFCVRQDVATSIVYKLEFSSLNKMERTIDGIMIKEICIKLKVDRLGNISKA

SEQ ID NO: 203 - protein, 1179 aa, Sphaerochaeta globus
MSKKVSRRYEEQAQEICQRLGSRPYSIGLDLGVGSIGVAVAAYDPIKKQPSDLVFVSSRIFIPSTGAAERRQKRGQRNSLRHRANRLKFLWKLLAERNLMLSYSEQDVPDPARLRFEDAVVRANPYELRLKGLNEQLTLSELGYALYHIANHRGSSSVRTFLDEEKSSDDKKLEEQQAMTEQLAKEKGISTFIEVLTAFNTNGLIGYRNSESVKSKGVPVPTRDIISNEIDVLLQTQKQFYQEILSDEYCDRIVSAILFENEKIVPEAGCCPYFPDEKKLPRCHFLNEERRLWEAINNARIKMPMQEGAAKRYQSASFSDEQRHILFHIARSGTDITPKLVQKEFPALKTSIIVLQGKEKAIQKIAGFRFRRLEEKSFWKRLSEEQKDDFFSAWTNTPDDKRLSKYLMKHLLLTENEVVDALKTVSLIGDYGPIGKTATQLLMKHLEDGLTYTEALERGMETGEFQELSVWEQQSLLPYYGQILTGSTQALMGKYWHSAFKEKRDSEGFFKPNTNSDEEKYGRIANPVVHQTLNELRKLMNELITILGAKPQEITVELARELKVGAEKREDIIKQQTKQEKEAVLAYSKYCEPNNLDKRYIERFRLLEDQAFVCPYCLEHISVADIAAGRADVDHIFPRDDTADNSYGNKVVAHRQCNDIKGKRTPYAAFSNTSAWGPIMHYLDETPGMWRKRRKFETNEEEYAKYLQSKGFVSRFESDNSYIAKAAKEYLRCLFNPNNVTAVGSLKGMETSILRKAWNLQGIDDLLGSRHWSKDADTSPTMRKNRDDNRHHGLDAIVALYCSRSLVQMINTMSEQGKRAVEIEAMIPIPGYASEPNLSFEAQRELFRKKILEFMDLHAFVSMKTDNDANGALLKDTVYSILGADTQGEDLVFVVKKKIKDIGVKIGDYEEVASAIRGRITDKQPKWYPMEMKDKIEQLQSKNEAALQKYKESLVQAAAVLEESNRKLIESGKKPIQLSEKTISKKALELVGGYYYLISNNKRTKTFVVKEPSNEVKGFAFDTGSNLCLDFYHDAQGKLCGEIIRKIQAMNPSYKPAYMKQGYSLYVRLYQGDVCELRASDLTEAESNLAKTTHVRLPNAKPGRTFVIIITFTEMGSGYQIYFSNLAKSKKGQDTSFTLTTIKNYDVRKVQLSSAGLVRYVSPLLVDKIEKDEVALCGE

SEQ ID NO: 204 - protein, 1370 aa, Streptococcus gallolyticus
MTKKNYSIGLDIGTNSVGWAVITDDYKVPAKKMKVLGNTDKKYIKKNLLGALLFDSGETAEATRLKRTARRRYTRRKNRLRYLQEIFAEEMTKVDESFFYRLDESFLTTDEKDFERHPIFGNKAEEDAYHQKFPTIYHLRNYLADSSEKADLRLVYLALAHMIKYRGHFLIEGKLNAENTDVQKLFTDFVGVYDRTFDDSHLSEITVDVASTLTEKISKSRRLENLIKYYPTEKKNTLFGNLIALALGLQPNFKMNFKLSEDAKLQFSKDTYEEDLEELLGKIGDDYADLFTSAKNLYDAILLSGILTVDDNSTKAPLSASMIKRYVEHHEDLEKLKEFIKANKSELYHDIFKDKNKNGYAGYIENGVKQDEFYKYLKNTLSKIDGSDYFLDKIEREDFLRKQRTFDNGSIPHQIHLQEMHAILRRQGDYYPFLKEKQDRIEKILTFRIPYYVGPLVRKDSRFAWAEYRSDEKITPWNFDKVIDKEKSAEKFITRMTLNDLYLPEEKVLPKHSHVYETYAVYNELTKIKYVNEQGKESFFDSNMKQEIFDHVFKENRKVTKEKLLNYLNKEFPEYRIKDLIGLDKENKSFNASLGTYHDLKKILDKAFLDDKVNEEVIEDIIKTLTLFEDKDMIHERLQKYSDIFTANQLKKLERRHYTGWGRLSYKLINGIRNKENNKTILDYLIDDGSANRNFMQLINDDTLPFKQIIQKSQVVGDVDDIEAVVHDLPGSPAIKKGILQSVKIVDELVKVMGDNPDNIVIEMARENQTTNRGRSQSQQRLKKLQSSLKELGSNILNEEKPSYIEDKVENSHLQNDQLFLYYIQNGKDMYTGDELDIDHLSDYDIDHIIPQAFIKDDSIDNRVLTSSAKNRGKSDDVPSLDIVRARKAEWVRLYKSGLISKRKFDNLTKAERGGLTEADKAGFIKRQLVETRQITKHVAQILDARFNTEHDENDKVIRDVKVITLKSNLVSQFRKDFEFYKVREINDYHHAHDAYLNAVVGTALLKKYPKLASEFVYGEYKKYDIRKFITNSSDKATAKYFFYSNLMNFFKTKVKYADGTVFERPIIETNADGEIAWNKQIDFEKVRKVLSYPQVNIVKKVETQTGGFSKESILPKGDSDKLIPRKTKKVYWDTKKYGGFDSPTVAYSVFVVADVEKGKAKKLKTVKELVGISIMERSFFEENPVEFLENKGYHNIREDKLIKLPKYSLFEFEGGRRRLLASASELQKGNEMVLPGYLVELLYHAHRADNFNSTEYLNYVSEHKKEFEKVLSCVEDFANLYVDVEKNLSKIRAVADSMDNFSIEEISNSFINLLTLTALGAPADFNFLGEKIPRKRYTSTKECLTATLIHQSITGLYETRIDLSKLGEE

SEQ ID NO: 205 - protein, 1044 aa, Nitrosomonas sp.
MLHKMRYRLALDLGSTSLGWAMVRLNANQQPCAVIKAGVRIFSNGRNPKDGSSLAVTRREARSMRRRRDRLLKRKARMMRTLIEYGFFPANETQRKALENLNPYALRAKGLDEALTPSEFARALFHINQRRGFKSNRKTDKKDSDSGALKTAIKQLHSVLDPQGNDGKPRTVGELLYKRFTDLSKLPKDRTVRARYRQDKIVKDDGKTKIDKYYDLYIDRAMIEQEFDALWKKQSELNPILFTENARADLKDVLLYQRSLKPVKPGRCTFMSEEERAPLALPSTQRFRMYQEVNNLRILREGLKEESLTLQQRDDLINALEKNNRRTFTQIKKLLGVGGSVQFNFEDPKREELKGNTTSAILGKSEHFGEAWFAFNEAKQDAIVLQLIKEENEAKLVRWLQDETGIDEKRAEVIANAGLPEGYGSLCIEALARILPELRRDVVTYDKAVQAAGFEHHSKLNRNEEIPDITFKIESIDRNSGEIKQFHLHKELPYYGEYLQRHVGFGSGKPEDSIEKRYGKIANPTVHIGLNQVRVVVNALIKRYGHPSEIIVEVARDLKQSKDRRDEENKRQAENQKRNERLRKDIADILGISEERVRRDDIEKMILWEELSFDPADRRCPYSGVQVSTVMLLSDEVEVEHILPFSQTLDDSLNNKTVALRQANRIKGNRTPWEAFGTSNISGFDYSGILTRAELMPKAKRYRFAEDGYQRWLKDDAGFLARALNDTRHLSKIAREYMSLICPNTRVIPGQMTAMLRRNFGLNDVLGLNGEKNRNDHRHHAVDACVIAVTDQGLLQRFAAASASARERQLNRLVENMPLPWESYREHVRRAIDGIWVSHRPDHSHEGAMHNDTAYGLRGNGRVSFHKMVEGKREYIEDNLKVIEITDTKAIDRHGLLPTGKPRPYKGYKGDSNYCIEIVRNEKGRWEGEIISTFDAYQLVRKYGIVQLRYPVLSVSGKPLVMRLIRNDFVRLEHEGITRTLRVCKMREDGQVALADVTEANVDARTRTKEICYVFKTGGSLQKAKARRITISPIGELRDPGFKE

SEQ ID NO: 206 - protein, 1045 aa, Acidovorax avenae
MQKEKPLAYRLALDLGSTSLGWAVLRLSAPGEPSAVIRAGSRIFSDGRNPKDGSSLAVTRRAARAMRRRRDRLLKRKARMLAALERHGFFPQDEAARKALEKLNPYGLRARGLESALKPEEFGRALFHLNQRRGFQSNRKTDRKDSDSGALKQAIGTLRAQMHESGCRTVGEWFWKVRMERKPEGVKGQGVRARYRETPFTTDEGKKRIDKRYDLYVDRAMVAQEFDALWAAQATFAPALFNEAARAELRDILLHQRKLRPVQPGRCTLVPEEPRALLALPSTQRFRIYQEVNHLRVLHDELREEALTLAQRDQIVALLERQAKVTFTAMRKALGFSALFNLEDAKRDGLKGNATTAALGKKDLFGPLWAGFDTALQDEIVTQLMTEESEPRLIAWLQEHTGVDEARAQAIANAGLPEGYGSLGRTALARIVPELQRDVITYDKAVQAAGFAHHSDLGFSFEHDADEVERIGERTIASTGEIKPVFAFKQLPYYGRALQRHVAFAKENPRNDEERYGKIANPTVHIGLNQVRVVVNALMCRYGRPTEVVIELARDLKQSREQKLEAQQRQADNQKRNARIRRSIAEVLGISEERVRTLDIQKWILWEELSHDAADRRCPYSGVQISASMLLGERVEIEHILPFSMTLDDSLNNRTVALREANRIKRNRTPWDARTDFEAHGWSYDGILQRAERMPQRKRHRFAPDGYERWLGEDKDFLARALNDTRYLSRVAAEYLRLVCPGSATRVIPGQMTALLRGKFGLNDVLGLDGEKNRNDHRHHAVDACVIGVTDQRMMQRFAQANAQAREDGLTRLVEDMPLPWPTYRAHVERAVRHIWVSHKPDHGFEGAMMEETSYGILRDGTIKQRRKADGSAGREISRLIRITEPSQPQRHGVDAEGRPLPYKGYVGGSNYCLEITVNDKGKWEGQVISTFDAYRIVREGGLRQLRHSTQGQNGQALAMRLVIGDSVRLEVDEQERVMRIVKINGNNGQVFMAPVHEANVDARNSDKNEAFAYTSKIAGSFQKTKARQVTISPIGELRDPGFKG

SEQ ID NO: 207 - protein, 1218 aa, Prevotella denticola
MKASEEKLSKGLSTYMKENNLLTVGAAFAQLEDEGVRIRNNNNYRAIRSQFQHEIETIFMFQQGLSENELYERLVSEKKNIGTIFYKRPLRSQRGNVGKCTLERTKPRCAIGHPLFEKFRAWTLINNIKIRMSEEEQAEQLPMKLRFELYNDCFLAFVRAEFKFEDIRKYLEKRLGVHFSYNDKTINYKDSTSVAGCPITARFRKLLGEDWESFHVDGQKQRQAHGKNNASFHTVSYSTNDIWHFCYDAEEPEAVLSFAQDNLKWEKKKAEELVRIWSAIPQGYAMLSQKAIRNINKMLILGLKYSDAVLLAKVPEIVEITDGEILSVTEDYHRVEAQVGYEKQINNIVNALIAKYKSASEEYRFADHNYEYQLDKSDEKDIIKQIESNIGTRKWSLLDADEQTDILQKVRDKYQNFFRSHERKFVESPKLGECFEEYLMKKFPMVEGEQWKKLYHPSQIAIYRPVSAGKDRSALRLGNPDIGAIKNPTVLRVLNTLRKRVNQLLDDGLISPDETRVVVETARELNDANRKWALDNYNRIRHDENEKIKKILEEFYPKRDGISTDDIDKARYVIDQREMDYFTEEKPYNKDIKKYKLWLEQGGQCMYTGRTINLSNLFDPNSFDVEHTIPESISFDSSDMNLTLCDAHYNRFIKKNHIPADLPNYDKSVVIDGKEYSPIKPRLQRWADRVERLNRNVEYWRGQARRAQNKDRKDQCMREMHLWKMELEYWTKKLERFTITEVTDEFKNSQLVDTRVITRHAVLYLKSIFPHVDVQRGDVTAKFRKILGIQSVDEKKDRSLHSHHAIDATTLTIIPGAAKRERMLELFAKIEEVNKMLSFSGNEDRTGLKQELDGLKNQLNKEVKACRIGHNVSEIGTFINDNIIINHHVKNQALTPVRRRLRKRGHIVGGMDNPRWQTGDALRGEIHKASYYGAITQFAKDKDGKVLLKEGHPLVDPTIKFVIRRELKYKKSTADSGFASWDDLEKAIVDKELFALMKGQFPEETSFKDACEQGIYMIKKGKNGEVDTKLYRIRHIRCKTKQKNALKIKEQAYKSEKEYKRYFYAAVGDLYAMCCYTNGKTREFKIYSLYDISCHRKVGVEDIPEFITDKKGNRLMLDYKLHTGDMILLYKENPEELYDLDNVSLSKLLYKINGFENDGLRIRMVNHLVAKEAMGESVKDYAKLPDIIRCGVKTIKFLVMGENRDFVIKNGKISFNHR

SEQ ID NO: 208 - protein, 1458 aa, Fluviicola taffensis
MTKTILGLDLGTNSIGWALINQDFDNKKGEILGMGSRIIPMTQDIKDEFGKGNSISQTAERTRLRGVRRLIHRTLLRRERLHRVLNIIGFLPEHYANQIDFEKRFGKFKPESEPKISFDGNDVFLFEKSYQEMLVDFKIHQPQLVSNGKKIPHDWTIYYLRKKALSKKIEKEELAWILLNFNQKRGYYQLRGEEEEETPNKLVEFHSLKIVEVNADEPQKGKPEIWYSLVLENGWVYRRASKTPLFDWKDKIREFIVTTEINNDGTVKTDKEGTEKRSFRAPKPEDWTLQKKKTEFELSKSGNEVGAFIYESILQKPNQKIRGKLISTIERKFYKEELKTILKTQLFFHKELKDEKLYNACIEELYKNNEAHRSLLSNKGFEHLFINDILFYQRPLRSKKSQISNCPLEKRTYKKEGIEITEGIKVISKSNPIYQEFRLWQWISNLSLYCIEPTETNVTSTFLNSIEDYENLFEFLNNRKEIEQKHLLKYLLENQGFKGKLLTNELEKFRWNFVADKKYPCNETGSLLHTRLSKVKNISPDFLTKEIEHQLWHIIYSVTDKIEYEQALKTFARKNNLDVDSFFEHFKKIPPFESTYGAYSEKAIKKLLPLIRLGKYWNWEAIDSISKDRISKILSGEYDENIKNRVREKAVHLTSENNFQGLQEWLAKYIVYDRHSEGNDLGKWTSVSDLETYLKEFKQHSLRNPIVEQVITETLRVVKDIWIKHGKGTENFFDEIHVELGREMKNNSEDRKRLTNTITENENTNLRIKALLMEMMNDNDVENVRPYSPSQQEILKIYEDGALNSNIELDDEIVKISKKAEPTKSELQRYKLWLEQKYRSPYTGQVIPLNKLFTSEYEIEHVVPQSRFFDDSFSNKVICESAVNKRKDNQLGLQFIKNHSGEKVELGFGKVVQVFTEEQYLDFVKEHYSKNRSKHNKLLLEEIPEKMIERQLNDTRYISKFVSSILSNIVRSEKDDDGLNSKNILPGNGKITTELKRDWGLNDVWNDLILPRFERMNTITNSDLFTTYNDKYQKHLPTVPFEYSKGFQKKRIDHRHHAMDALVIACATRDHLNLMNNQSAKSELKRYDLQNKLRKKEPYFNQKENKQKEAFKDFIKPWGTFTEDSKNALEKIIISFKQNLRVINKATNSYESYKDEDGNLRIGKDGKPEKGLIKQKGLNWAIRKPLHKDTVSGQINLSRIKLPNGKILTATRKNLDTSFDLKTIENSITDTGIQKILKNYLLSKESPELAFSPEGLEEMNNEIEKYNNGKFHHPINKARIYELGSKFNVGQTGNRRDKFVEAAKGTNLFFAIYQDENKNRSYETIPLNEVIEHQKWRASLPKEEQEKIPLVPVNKLKGTFIFSLSPNDLVYVPSNDELERSASIDFSKLKKEQINRLYKMVSSSGSQCFFVKSEVATSVVNKMEYSSLNKMEKSIDNLMVKEICIKLKIDRLGNISKA

SEQ ID NO: 209 - protein, 1384 aa, Coriobacterium glomerans
MKLRGIEDDYSIGLDMGTSSVGWAVTDERGTLAHFKRKPTWGSRLFREAQTAAVARMPRGQRRRYVRRRWRLDLLQKLFEQQMEQADPDFFIRLRQSRLLRDDRAEEHADYRWPLFNDCKFTERDYYQRFPTIYHVRSWLMETDEQADIRLIYLALHNIVKHRGNFLREGQSLSAKSARPDEALNHLRETLRVWSSERGFECSIADNGSILAMLTHPDLSPSDRRKKIAPLFDVKSDDAAADKKLGIALAGAVIGLKTEFKNIFGDFPCEDSSIYLSNDEAVDAVRSACPDDCAELFDRLCEVYSAYVLQGLLSYAPGQTISANMVEKYRRYGEDLALLKKLVKIYAPDQYRMFFSGATYPGTGIYDAAQARGYTKYNLGPKKSEYKPSESMQYDDFRKAVEKLFAKTDARADERYRMMMDRFDKQQFLRRLKTSDNGSIYHQLHLEELKAIVENQGRFYPFLKRDADKLVSLVSFRIPYYVGPLSTRNARTDQHGENRFAWSERKPGMQDEPIFPWNWESIIDRSKSAEKFILRMTGMCTYLQQEPVLPKSSLLYEEFCVLNELNGAHWSIDGDDEHRFDAADREGIIEELFRRKRTVSYGDVAGWMERERNQIGAHVCGGQGEKGFESKLGSYIFFCKDVFKVERLEQSDYPMIERIILWNTLFEDRKILSQRLKEEYGSRLSAEQIKTICKKRFTGWGRLSEKFLTGITVQVDEDSVSIMDVLREGCPVSGKRGRAMVMMEILRDEELGFQKKVDDFNRAFFAENAQALGVNELPGSPAVRRSLNQSIRIVDEIASIAGKAPANIFIEVTRDEDPKKKGRRTKRRYNDLKDALEAFKKEDPELWRELCETAPNDMDERLSLYFMQRGKCLYSGRAIDIHQLSNAGIYEVDHIIPRTYVKDDSLENKALVYREENQRKTDMLLIDPEIRRRMSGYWRMLHEAKLIGDKKFRNLLRSRIDDKALKGFIARQLVETGQMVKLVRSLLEARYPETNIISVKASISHDLRTAAELVKCREANDFHHAHDAFLACRVGLFIQKRHPCVYENPIGLSQVVRNYVRQQADIFKRCRTIPGSSGFIVNSFMTSGFDKETGEIFKDDWDAEAEVEGIRRSLNFRQCFISRMPFEDHGVFWDATIYSPRAKKTAALPLKQGLNPSRYGSFSREQFAYFFIYKARNPRKEQTLFEFAQVPVRLSAQIRQDENALERYARELAKDQGLEFIRIERSKILKNQLIEIDGDRLCITGKEEVRNACELAFAQDEMRVIRMLVSEKPVSRECVISLFNRILLHGDQASRRLSKQLKLALLSEAFSEASDNVQRNVVLGLIAIFNGSTNMVNLSDIGGSKFAGNVRIKYKKELASPKVNVHLIDQSVTGMFERRTKIGL

SEQ ID NO: 210 - protein, 1077 aa, Neisseria bacilliformis
MQQKPQRYILGLDLGIASVGWACVWADENEHPTGLLDCGVRTFERAEVPKTGDSLALARRQARSVRRLIRRRAHRLLRLRRLLKREGVLLSADFNENGLVRGLPIDAWALRVAGLDRKLSNKEWAAVLLHLVKHRGYLSQRKNETQSKDKELGRLLAGVNGNREALQNRSDEYRTAAELAVKKFAAENNGSLRNKGGDYSHTFDRKDLQRELHLLFERQRALDNPFTSSEMEAAVDELLMKQRSALQGEAVLKMLGRCTFEPSEYKAAKNTYSAERFVWLTKLNNLRIQYNGEERALSEAERRLLLDEPYQKAKLTYKQVRTILELPESAVFKGLRYGHGEDGLKAESGTLMEMKAYHAVRKALKDAGLEGEWENRIRNPELLDAIGTAFSLYKTDEDIRANLAAFRLSENVLEALLAGLNFDKFVHLSLKALAKILPLMEQGMRYDEACKEAYGDHYGAKEQEDHRLLPPFVADDIRNPVVFRTLTQARKIVNEIVRRYGSPLRVHIETGREVGKSFSDRKEIEKRQEENRKERERAAAHFKELFPNFAGEPKAQDILKLRLYEQQHGKCLYSGKEIDLRRLPEKGYVEIDHALPFSRTWDDSFNNKVLVLGKENQDKRNRTPYEYLDGKGNSGAWRAFAERVSGCRFPYAKKQRLLTQKLDEKTEQGFLERNLNDTRYVARFLCQFIEEKMHLEGAGKKRVFASNGQITALLRGFWGLKKVREENDRHHALDAVVVACSSVSMQQKITRHFRYREELEHIDRETGEVIHGFPQPWEFFRQEVMTRVFSDDPVSELAEKLDSRPEAVHEFVTPLFVSRAPHRKVTGQGHLETIRSAKRLDEKISVVKLPLTQLKTKDIERIVGYPNREPALYDALAARLAAFKDDPAKAFSEPFYKTGKDGKCGVLVKAVRVENVQKSGLLVRKDESGKMQGVADNATMVRVDVFGKNGKNYLVPVYAWQVEKGELPNRAVVAYADEEDWDEMDDSFEFKFSLYPNDLVEVVTKKDKFFGYYSGFNRATGAINIKEHDLSKSKVKNGVYEGIGVKTAQSFQKYQVDTLGKTIRLCKPEKRMGFKKK

SEQ ID NO: 211 - protein, 1029 aa, Alicycliphilus denitrificans; identical to SEQ ID NO: 188

SEQ ID NO: 212 - protein, 1122 aa, Streptococcus suis; identical to SEQ ID NO: 82

SEQ ID NO: 213 - protein, 1428 aa, Parasutterella excrementihominis
MGKTHIIGVGLDLGGTYTGTFITSHPSDEAEHRDHSSAFTVVNSEKLSFSSKSRTAVRHRVRSYKGFDLRRRLLLLVAEYQLLQKKQTLAPEERENLRIALSGYLKRRGYARTEAETDTSVLESLDPSVFSSAPSFTNFFNDSEPLNIQWEAIANSPETTKALNKELSGQKEADFKKYIKTSFPEYSAKEILANYVEGRRAILDASKYIANLQSLGHKHRSKYLSDILQDMKRDSRITRLSEAFGSTDNLWRIIGNISNLQERAVRWYFNDAKFEQGQEQLDAVKLKNVLVRALKYLRSDDKEWSASQKQIIQSLEQSGDVLDVLAGLDPDRTIPPYEDQNNRRPPEDQTLYLNPKALSSEYGEKWKSWANKFAGAYPLLTEDLTEILKNTDRKSRIKIRSDVLPDSDYRLAYILQRAFDRSIALDECSIRRTAEDFENGVVIKNEKLEDVLSGHQLEEFLEFANRYYQETAKAKNGLWFPENALLERADLHPPMKNKILNVIVGQALGVSPAEGTDFIEEIWNSKVKGRSTVRSICNAIENERKTYGPYFSEDYKFVKTALKEGKTEKELSKKFAAVIKVLKMVSEVVPFIGKELRLSDEAQSKFDNLYSLAQLYNLIETERNGFSKVSLAAHLENAWRMTMTDGSAQCCRLPADCVRPFDGFIRKAIDRNSWEVAKRIAEEVKKSVDFTNGTVKIPVAIEANSFNFTASLTDLKYIQLKEQKLKKKLEDIQRNEENQEKRWLSKEERIRADSHGICAYTGRPLDDVGEIDHIIPRSLTLKKSESIYNSEVNLIFVSAQGNQEKKNNIYLLSNLAKNYLAAVFGTSDLSQITNEIESTVLQLKAAGRLGYFDLLSEKERACARHALFLNSDSEARRAVIDVLGSRRKASVNGTQAWFVRSIFSKVRQALAAWTQETGNELIFDAISVPAADSSEMRKRFAEYRPEFRKPKVQPVASHSIDAMCIYLAACSDPFKTKRMGSQLAIYEPINFDNLFTGSCQVIQNTPRNFSDKTNIANSPIFKETIYAERFLDIIVSRGEIFIGYPSNMPFEEKPNRISIGGKDPFSILSVLGAYLDKAPSSEKEKLTIYRVVKNKAFELFSKVAGSKFTAEEDKAAKILEALHFVTVKQDVAATVSDLIKSKKELSKDSIENLAKQKGCLKKVEYSSKEFKFKGSLIIPAAVEWGKVLWNVFKENTAEELKDENALRKALEAAWPSSFGTRNLHSKAKRVFSLPVVATQSGAVRIRRKTAFGDFVYQSQDTNNLYSSFPVKNGKLDWSSPIIHPALQNRNLTAYGYRFVDHDRSISMSEFREVYNKDDLMRIELAQGTSSRRYLRVEMPGEKFLAWFGENSISLGSSFKFSVSEVFDNKIYTENAEFTKFLPKPREDNKHNGTIFFELVGPRVIFNYIVGGAASSLKEIFSEAGKERS

SEQ ID NO: 214 - protein, 1371 aa, Lactobacillus buchneri
MKVNNYHIGLDIGTSSIGWVAIGEDGKPLRIKGKTAIGARLFQEGNPAADRRMFRTTRRRLSRRKWRLKLLEEIFDPYITPVDSTFFARLKQSNLSPKDSRKEFKGSMLFPDLTDMQYHKDYPTIYHLRHALMTQDEKFDIRMVYLAIHHIVKYRGNFLNSTPVDSFKASKVNFVDQFKKLNELYTAINPEESFQINLANSEDIGHQFLDPSIRKFDKKKQIPKIVPVSVDDKATDKINGKIASEIINAILGYKSKLDVVVQCTPVDSKSWALKFDEEDIDAKLQKILPEMDENQQSIIAILQNLYSQVTLNQIVPNGMSLSESMIEKYNDHHDHLKLYKKIIDQLADPKKKAALKKAYSQYVGDDGKVIEQADFWSSVKKNLDDSDLSKQIMDLIDAEKFMPKQRTSQNGVIPHQLHQRELDEIIEHQSKYYPWLAEINPNKHDLHLAKYKIEELVAFRVPYYVGPMITPDDQAKSAETVFSWMERKGKEAGQITPWNFDEKVDRNASANRFIKRMTTKDTYLIGEDVLPDESLLYEKFKVLNELNMVRVNGKLLKVADKQAIFQDLFENYKHISVKKLQNYIKSKTGLPSDPEISGLSDPEYFNNSLGTYNDFKKLFGNKVDEPDLQDDFEKIVEWSTVFEDKRILREKLNEITWLSDQQKDVLESSRYQGWGRLSKKLLTGIVNDQGERIIDELWNTNKNFMQIQSDNDFAKRIHEANADQMKAVDVEDVLADAYTSPQNKKAIRQVVKVVDDIQKAMGGVAPKYISIEFTRSEDRNPRRTISRQRQLENTLKDTAKSLAKSINPELLSELDNAAKSKKGLTDRLYLYFTQLGKDIYTGKPINIDEISTYDIDHILPQAFVKDDSLNNRVLVSKAINNGKSDNVPVQLFGAKMGHFWKQLAEAGLISKRKLKNLQTDPDTISKYAMHGFIRRQLVETSQVIKLVANILGDKYRNDNTKIIEITARMNHQMRDEFGFIKNREINDYHHAFDAYLTAFLGRYLYHRYIKLRPYFVYGDFKKFKEDKVTMRNFNFLHDLTDDTQEKIADAETGEVIWDRENSIQQLKDVYHYKFMLISHEVYTLRGAMFNQTVYPASDAGKRKLIPIKADRPINVYGGYSGSADAYMAIVRIHNKKGDKYRVVGVPMRARDRLDAAKKVSDADCDRALKDVLTPQLTKTKKSRKTGEITQVVEDFEIVLGKVMYRQLMIDGDKKFMLGSSTYQYNAKQLVLSDQSVKTLASKGRLDPLQESMDYNNVYTEILDKVNQYFSLYDMNKFRHKLNLGFSKFISFPNHNVFDGNTKASSGKREILEEVLNGLHANPTFGNLKDIGITTPFGQLQQPNGILLSDEAKIRYQSPTGLFERTVSLKDL

SEQ ID NO: 215 - protein, 1090 aa, Sphingomonas sp.
MDWRLGLDLGANSLGWAALRLDRAGDPIGILAMGSRIFSDGRDPKSGASLAVDRRAARAMRRRRDRFKQRQAALLKYLIRDGLFPADQADRQRLADEDPYALRARALDEELSLFEIGRALFHLNQRRGFQSNRKADRGQDDEAGKIAVGVDRLNQQMEEQGARTLGEFLHQRRRAATDANHIPSVRTRLRPETGEGAKGDGYDFYPSRALIAEEFEEIWAAQAPHYPDTLTQQVHDRLYEIIFHQRPLRAPQVGQCTLVAGETRLPKAHPLFQKRRLLEEINALMIVRPGEIAQRLTPEERDTLYLKLKDKRTVSFATLRKTLKLDSAARFNKESENRTELKGDEVAAELGAKTRLGTRWQHLSGDQQWEVVHRLMALESQADEAAFRDWISQTYDLLPEQAAAVLGARLPQGHGRFGPTATTTLIDSLLHDRTEDGRVVVYSEAVQRSGLGHHSDLRHDRDDEDVTELPYYGVALERHIMPGTAEPTDPEEMRIGRLTNPTVHIGLNQLRHVVNRLIRAYGPPKEIAIELARELKLSEDEKKKRNSENRDNRLAAEGRSKKLEEIRQRDTGANRALLKLWEELNPGNVLDRRCIYTGEQISIDMLFSDRVEVDHILPFAQTLDDSNGNKLLCLREANREKRRRSPYEAWGHTDRWPDIAERASRLPKPKRWRFEPDAMQRFATEDGFLARHLVDTQYLGRLAREYLSWLYPGRGEGSGHVWVSPGRLTEMVRRKLGLNDLLPDHNFGGGADQPKNRLDHRHHAIDALVVAIVDRGMLQAIARASGQDGSEGRERIHIPAPWDGFRDDLRVAVNGIIVSHRPDHGTVAKAGLARGRDQTAGRLHNDTAYGLTGETDAKGNSIVVRRIPLSAIKKPADIARVRDPLLRNALAEFTKGLDGKAFEARIGRFHELGPLLYRGIRRVRVVETLTVIPIRDAEGRAYKGYKGDSNYRYDVWEMPDGKWRCQVVSMFDAHQSTEQARPHPAARKILSLQRNDILAIERTEGDRELVRVVKFSEKQFAVAPPHEGGSLKTRDGNADDPFRYLYPSPNTLKGWRARQVRIDELGRVLDPGFPARKSVRRTRPRAAPVD

SEQ ID NO: 216 - protein, 1000 aa, Kingella kingae
MARAQRRLISRRANRMNKLRRLLKQENVLQANDYDEKGLIIGLPNQAWELRAQGLDRKLEPKEWAAVLINLVKHRGYLSQRKNESQTADKELGALLSGMNHNHQLLQSQSNQYRTPAELAIKQFATQDGHIRNQRGAYTHTFNRLDLQNELNQLFDAQTRLGNPHVSGSLKTAINDLLMNQKAALSGDAILEMLGRCTFEPSEYKAAKNTYSAERFVWLGKLTNLRIQDNGLESALSREQRELLLNEPYNKTKLTYQQVRKLLRLPETAFFKGLRYGKDNAESATFMEMKSYHAIRKSLENKSLKSEWEKLKTQPKLLDLIGTAFSIYKTDDEIAGCLKNQLPENVIIALQEQLNFSNFMELSLKALEKLLPLMEQGLRYDEACTQIYGNRHEKIADKTEKFLPNIPADKLRNPVVLRTLTQARKVINAIIRRYGSPARVHIETGREVGKSFSDRDKLKKQQEENQEQRRRAIDEWKQFFPNAAHEPKAVDILKLRLYQLQQGKCLYSGLPIDVRRLPEKGYVEIDHALPFSRTWDDSFNNKILVLASENQNKGNQTPYEYLRGADNSESWRLFVENVQNCQFSPNKKQKIMAKQLDEKGFLERNLNDTRYVSRFLCQFISEHLHLTGKGKKRVFASNGQITALLRGRWGLSKNREENDRHHAVDAVVVACSTVAMQQKITQFVRYQKGNVFTGERIDKETGEVISIHFPTPWEHFREEVMIRVFDDNPLRTLPEKLPNRPEALHEYVMPLFVSRMPTRKMTGQGHKETIKSAKRLDEKISVLRVPLTQLKLNDLENMVNREREPALYEALKARLEQFKNDPAKAFAEPFFKQGGQQVKAVRVEIVQKSGMLLRKINGVADNGSMVRVDVFEKSGKFYLVPIYAWQVAEGILPNYAVVAHKDESDWILMDESYHFKFALYKNDLLEVQTKKGGIMGYFASLDRATGAITIREHDRDKKKCKDGEHRSIGVKMASSFKKLQVDELGKNIHETRSRKRPNIG

SEQ ID NO: 217 - protein, 1130 aa, Streptococcus pasteurianus
MTNGKILGLDIGIASVGVGIIEAKTGKVVHANSRLFSAANAENNAERRGFRGSRRLNRRKKHRVKRVRDLFEKYGIVTDFRNLNLNPYELRVKGLTEQLKNEELFAALRTISKRRGISYLDDAEDDSTGSTDYAKSIDENRRLLKNKTPGQIQLERLEKYGQLRGNFTVYDENGEAHRLINVFSTSDYEKEARKILETQADYNKKITAEFIDDYVEILTQKRKYYHGPGNEKSRTDYGRFRTDGTTLENIFGILIGKCNFYPDEYRASKASYTAQEYNFLNDLNNLKVSTETGKLSTEQKESLVEFAKNTATLGPAKLLKEIAKILDCKVDEIKGYREDDKGKPDLHTFEPYRKLKFNLESINIDDLSREVIDKLADILTLNTEREGIEDAIKRNLPNQFTEEQISEIIKVRKSQSTAFNKGWHSFSAKLMNELIPELYATSDEQMTILTRLEKFKVNKKSSKNTKTIDEKEVTDEIYNPVVAKSVRQTIKIINAAVKKYGDFDKIVIEMPRDKNADDEKKFIDKRNKENKKEKDDALKRAAYLYNSSDKLPDEVFHGNKQLETKIRLWYQQGERCLYSGKPISIQELVHNSNNFEIDHILPLSLSFDDSLANKVLVYAWTNQEKGQKTPYQVIDSMDAAWSFREMKDYVLKQKGLGKKKRDYLLTTENIDKIEVKKKFIERNLVDTRYASRVVLNSLQSALRELGKDTKVSVVRGQFTSQLRRKWKIDKSRETYHHHAVDALIIAASSQLKLWEKQDNPMFVDYGKNQVVDKQTGEILSVSDDEYKELVFQPPYQGFVNTISSKGFEDEILFSYQVDSKYNRKVSDATIYSTRKAKIGKDKKEETYVLGKIKDIYSQNGFDTFIKKYNKDKTQFLMYQKDSLTWENVIEVILRDYPTTKKSEDGKNDVKCNPFEEYRRENGLICKYSKKGKGTPIKSLKYYDKKLGNCIDITPEESRNKVILQSINPWRADVYFNPETLKYELMGLKYSDLSFEKGTGNYHISQEKYDAIKEKEGIGKKSEFKFTLYRNDLILIKDIASGEQEIYRFLSRTMPNVNHYVELKPYDKEKFDNVQELVEALGEADKVGRCIKGLNKPNISIYKVRTDVLGNKYFVKKKGDKPKLDFKNNKK

SEQ ID NO: 218 - protein, 1119 aa, Lactobacillus coryniformis
MGYRIGLDVGITSTGYAVLKTDKNGLPYKILTLDSVIYPRAENPQTGASLAEPRRIKRGLRRRTRRTKFRKQRTQQLFIHSGLLSKPEIEQILATPQAKYSVYELRVAGLDRRLTNSELFRVLYFFIGHRGFKSNRKAELNPENEADKKQMGQLLNSIEEIRKAIAEKGYRTVGELYLKDPKYNDHKRNKGYIDGYLSTPNRQMLVDEIKQILDKQRELGNEKLTDEFYATYLLGDENRAGIFQAQRDFDEGPGAGPYAGDQIKKMVGKDIFEPTEDRAAKATYTFQYFNLLQKMTSLNYQNTTGDTWHTLNGLDRQAIIDAVFAKAEKPTKTYKPTDFGELRKLLKLPDDARFNLVNYGSLQTQKEIETVEKKTRFVDFKAYHDLVKVLPEEMWQSRQLLDHIGTALTLYSSDKRRRRYFAEELNLPAELIEKLLPLNFSKFGHLSIKSMQNIIPYLEMGQVYSEATTNTGYDFRKKQISKDTIREEITNPVVRRAVTKTIKIVEQIIRRYGKPDGINIELARELGRNFKERGDIQKRQDKNRQTNDKIAAELTELGIPVNGQNIIRYKLHKEQNGVDPYTGDQIPFERAFSEGYEVDHIIPYSISWDDSYTNKVLTSAKCNREKGNRIPMVYLANNEQRLNALTNIADNIIRNSRKRQKLLKQKLSDEELKDWKQRNINDTRFITRVLYNYFRQAIEFNPELEKKQRVLPLNGEVTSKIRSRWGFLKVREDGDLHHAIDATVIAAITPKFIQQVTKYSQHQEVKNNQALWHDAEIKDAEYAAEAQRMDADLFNKIFNGFPLPWPEFLDELLARISDNPVEMMKSRSWNTYTPIEIAKLKPVFVVRLANHKISGPAHLDTIRSAKLFDEKGIVLSRVSITKLKINKKGQVATGDGIYDPENSNNGDKVVYSAIRQALEAHNGSGELAFPDGYLEYVDHGTKKLVRKVRVAKKVSLPVRLKNKAAADNGSMVRIDVFNTGKKFVFVPIYIKDTVEQVLPNKAIARGKSLWYQITESDQFCFSLYPGDMVHIESKTGIKPKYSNKENNTSVVPIKNFYGYFDGADIATASILVRAHDSSYTARSIGIAGLLKFEKYQVDYFGRYHKVHEKKRQLFVKRDE

SEQ ID NO: 219 - protein, 1126 aa, Lactobacillus farciminis
MADRISLGLDIGVASVGFSVLDIDKGKVIELGARLFSATVAAGNQDRRDMRGARRLLNRNKQRRQDTGKLFKKFGLIDDFDKGSFYDNFNQNLNPYELRVKGLTEQLTKEELAESLYQIVKHRGISYALKDADVDEGGTDYSVSLKINSQELAEKTPAQIQLQRLNDYGKVRGQVVIGDDPDNQKVLLNVFPTSAYEKEAKQIIATQQQFYPESLTDKFTEEYCQILTRKRDYFVGPGNEKSRTDYGIYKTDGRTLDNLFEELIGHDKIYPEELRASAASYTAQLFNVLNDLNNLRILNYEDGKLTKEDKEKIIAEIKNNTTTINMLNVIKKVAGCSKDDIKGFRVNEKDKPEISSMPVYRKIHKDLLKAGVDISDWPVEFIDELSFILTLNTENGEIRKQLNNRLAPKFDFLNADLIQLIIDNKDSFEIKTNNKWHRFSVKTMNKLIPEMMERPVEQMTLLNEMGLVKKDKKRFENNKYLPYKEIAKDIFNPVASKSVREALKIVNAVLKKYGHIDYLVVEMPRDKNLKEEQDNIKEFQNKNKKAKDAAFEAFVKSVGSEQRVKEALSKNRKLQMKMRLWYQQQEIDPYNGKTIDATDLINNPDKFEIDHIIPQSISFYDSINNKTLCFASMNQVKGQKTPYEFMLEGHGQSYDKFKATVMANKNFGKAKRANYLFEENVSDIETRKRFLSRNLVDTRYSSRVVLNSLQDFFREKSADTKVTVIRGKFTSNMRKHWHIDKTRETFHHHAIDASIIAATPFLRMWKKGGTIFPVKVGEESIDIETGEILDDKNFDKAMYEEPYSGFVSEIMNADDRIKFSHQVDKKMNRKVSDATIYSTRTGKLAKDKKDAEYIVAKVKDIYSVDGFKKFKKVYDKDKTKFLLYKYDPRTFSKLERIISDCPDKVEKVQTNGKVKAVDISPFEMYRRDHGMIKKYSKKGNGPAIKQLKYLDKKLGSHIDITPANANGKHVILQSLKPWRTDVYLNHETGEYEIMGIKYSDLKFNKNEGYGIKKDKYLEIKKVEEVSEKSEFMFSLYRKDRVKVQDMKTGESVELLFWSRNFSNKKYAELKPISQAENDKKLPVYGKGRLIKRLIPKNCKIWKVNTTILGDPYYLEKESDSPKDILD

SEQ ID NO: 220 - protein, 1380 aa, Eggerthella sp.
MNLRHVGNYNIGLDMGTASVGWAAIDEQGELLHFKGKPTWGSRLFDSANTAATARMPRGQRRRYIRRRWRLDLLQKFFSEEMAEKDPEFFIRLRQSSLWPEDREGGHTAYHWPLFNDSDFNEKEYYEKFPTIFHLRQWLMETDEKADIRLIYLAFHNIVKHRGNFLQENNDSLSAQNANMRESLESFCIALEEWCDEKELTCSCDPQKLEHLFKEVKYRSDIRDGFAALLGLACSGENEVDVKAMAKEMGKAIVGYKADFSKIFTECDKEGSSFRLSDDEGPEAFLDICPDDGIALFEAIQMVYSSFILTGMLTEKGLSLSKISAYNQYGQDLESLKALVKEYVPNEYSSFFRGPTYSGSTEYDPSKAQGYTRYNLGPSKKGSGAKPMAYEDFKKSVEQLFANTNAINDERYKEMMGRFAEEKFLRRLRTSDNGRIPFQLNLEEMTAIIINQGKYYPFLLEQQEKLESLVRFRIPYYVGPLTRINARLDSKGNACFAWSKRKDGMDSASIKPWNWDEVIDKHASAQAFIERMTGTCTYLRGEPVLPRCSLLYEEYCVLNELNGARWTQDGDKFIRFDYKDRSDIIEELFKKRRGRIQYAAVADWMKQERSHANVHVSGGQGENAFESRLSSYHFFCNDVFGVDELPGSYVDMVEEIILWSTLFEDRSILREEIQRKYGDVLNEEQIKTICKKRFSGWGRLSRKLLCSLKAQTDNGPKSIMDILQEGDQNNGRVGRAMVFQEILHDEQLGFEQKIEEENTQSMLEGENLLIEDLPGSPAIRRSINQAVRIVDEIVGIAGHAPDNIFIEVTREDDTKKKGKRTTTRYSNIQKALEALKEEGAEALRELKTYKHNELDKRLSLYFMQNGKSLYSGIPLDIRRLSEYQIDHIIPQSYIKDDSYENMALVLPGENQSKADNLLISQDIRIKMKATWTALHKAGLMGDKKYNNLMNSSISDAKMKGFINRQLVETSQSVKLTQMMLSQKYPGAKVRPIKASISSQLRDACDLVKCREANDYHHAHDAYLACQVGRFVLKRHSSMFDNPIGMTKVIRDFVKRQGQEFKRNGKLPAYASRSGFIVQSFMRSGFDAETGELLRDDWNAPFEIARIKRCLNYRDCYISRMPMEDSGAFWDATIYSPKAGKKGALPVKQGLPVEKYGSYSREQFAYFFVYKAYNPKKKAYRLEFEAVPVRVASAVETRENALEEYAKSVAKQAGLEFVEVARPKVYKYQLIELGEDRLYITGKREVRNASQLAFSLDEIDLLKRLAEGEETSSEERERLFDVLIEKYARYAPRLARQLSVDSMSATFETLNAEEQLGILLSLVEIANGKRNMIDLSSAGGSKNAGCMNPTFSSELSSPGSNFTFIDQSVTGMFERRQRLEL

SEQ ID NO: 221 - protein, 1430 aa, Capnocytophaga canimorsus
MKHILGLDLGTNSIGWAVVKEAQNDNEQSEIVDVGVRVNPLTTDEKTNFEKGKPISTNADRTLKRSARRNLQRYKLRRKELIELLKEHQLISTDTILTENGKGTTFQTLELRAKSAKEKISLEELARVFLTINKKRGYKSSRKAKNEDEGQLIDGMEIAKRLYEENLTTGQLSLQLLKEGKKSLPDYYRSDLQFELDKVWNFQKQFHSHILTDEFYAQLKGKGQRATSALFLAKYQIYTAENKGSREDKKLQAYQWRVDALSKELTREQLAFVITEINNNLNNSSGYLGAISDRSKELYFNNETVGEYLWKQIAANPHTSLKNQVFYRQDYLDEFEQIWKTQSAFYPEILTDELKKELRDVVIFYQRKLKSQKSLVSFCEFENKEIEIKKEDGTSTKKVIGLKVAPKSSPLFQEFKIWQNLNNVLIRKKGSKTKKVDKNQQAVLFEEEKTIFELDLEAKQALFNELNLKGNLKAYYCLEILGYSPKEWEMNYSVLEGNRTNKALYEAYLKITDLEGYDAKNHLKVKLNKDEVELDDLKVPASEIKDMVQAIFKEAGINTDILHFNAELDGKDFENQASYQLWHLLYSYEGDDSKSGNELLYKLLETKFGFKKEYAQILANVSLSDDYGSLSTKAMRKIHPYIKENKFSTACELAGYRHSKHSLTKEENDNRVLKDSLEVLKKNSLRQPVVEKILNQMINLVNALLKKYRTENPNFKFDEIRIELARELKKNAEERANMTVNINKAKTEHEKIIKILKNEFGLPNPTRNDIIRYRLYEELKANGYKDLYTNEYIEKQDLFTKNIDIEHIIPKSRVFDDSFSNKTLSFRKTNLDKGERTAFDYIESKFGADKLEEYVARVEDLYKNNIISKAKYQKLLKKESEIGDGFVERDLRETQYIAKKAKEILLQITPNVLSTSGGITDRLREDWDLINVMKELNLPKYRALGLTQMEDRKYGQQVEVIIDWTKRNDHRHHAMDALTVAFTKHNHIQYLNYLNARKNEKHREHSNIMGIQQLETIKVTDKNGNEKRVFKAPMPNFRQVTKAFLENVLISHKAKNKVVTKNKNKVAGSNKVQEVLTPRGQLHKETVYGKYQYYVQKEEKIGGKFDLETIKKVANPLYQSLLKKRLEENGGDPKKAFTGKNSLAKNPIYLDDAQTEQLPEKVKLVWLENSFSIRKDITPENFKDEKLIDKILDEGVKRILKERLQSFGNDAKKAFSDLDKNPIWLNKEKGIAIKRVAISGVANAEPLHTKKDHLGKEILDKEGKSIPVDFISTGNNHHVAVYRDEKGNLQEKVVSVFEAVVRANQGLPIIDKTYNQHLGWEFLFTMKQNEMFVFSNESTGFNPNDIDLLDPKNKKIISPNLFRVQKFSKLQYGNSFVREFVFRHHLETTVEDRKELQGITYKQMKNSAFFNDIIKVRINHLGGIVSVGEY

SEQ ID NO: 222 - protein, 1348 aa, Finegoldia magna
MKSEKKYYIGLDVGTNSVGWAVTDEFYNILRAKGKDLWGVRLFEKAKTAADTRTFRSGRRRNDRKGVRLQILREIFEDEIKKVDKDFYDRLDESKFWAEDKKVSGKYSLFNDKNFSDKQYFEKFPTIFHLRKYLMEEHGKVDIRYYFLAINQMMKRRGHFLIDGQISHVTDDKPLKQQLILLINDLLKIELEEEFMDSIFEILADVNEKKTEKKNILKELINAQDFNKQEGKILYSIFESIVTGKAKIKNIISDEDILEKIKEDNKEDFVLTGDSYEENLQYFEEVLQENITLFNTLKSAYDFVILQSILKGKSTLSDAQVERYDEHKKDLEILKKVIKKYDEDGKLFKQVFKEDNGNGYVSYIGYYLNKNKKITAKKKISNIEFTKYVKGILEKQCDCEDEDVKYLLGKIEQENFLLKQISSINSVIPHQIHLFELDKILENLAKYYPSFNNKKEEFTKIEKIRKTFTFRIPYYVGPLNDYHKNNGGNAWIFRNKGEKIRPWNFEKIVDLHKSEEEFIKRMLNQCTYLPEETVLPKSSILYSEYMVLNELNNLRINGKPIDTDVKLKLIEELFKKKTKVTLKSIRDYMIRNNFADKEDFDNSEKNLEIVSNMKSYIDFNNILGDKFELEMVEDLIEKITIHTGNKKLLKKYIEETYPDLSSSQIQKIINLKYKDWGRLSRKLLDGITGTNIETGEIDTVINFLRNSSDNLMQIIGSQNYSFNNDIDKLRKKYIPQEISYEVVENLYVSPSVKKMIWQVIRITEEITKVMGYDPDKIFIEMAKSEEGKKTTISRKNKLLALYKAIKKDERDSQYEKLLTGLNKLDDSDLRSRKLYLYYTQMGRDMYTGEKIDLDKLFDSTHYDKDHIIPQSMKKDDSIINNLVLVNKNANQTTKGNIYPVPSSIRNNPKIYNYWKYLMEKEFISKEKYNRLIRNTPLTNEELGGFINRQLVETRQSTKAIKELFEKFYKKSKIIPVKAILASDLRKDMNTLKSREVNDLHHAHDAFLNIVAGDVWNREFTSNPINYVKENREGDKVKYSLSKYFTRPRKSKGKVIWTPEKGRKLIVDTLNKPSVLISNESHVKKGELFNATIAGKKDYKKGKIYLPLKKDDRLQDVSKYGGYKAINGAFFFLVEHTKSKKRIRSIELFPLHLLSKFYEDKNTVLDYAINVLQLQDPKIIIDKINYRTEIIIDNFSYLISTKSNDGSITVKPNEQMYWRVDEISNLKKIENKYKKDAILTEEDRKIMESYIDKIYQQFKAGKYKNRRTTDTIIEKYEIIDLDTLDNKQLYQLLVAFISLSYKTSNNAVDFTVIGLGTECGKPRITNLPDNTYLVYKSITGIYEKRIRIK

SEQ ID NO: 223 - protein, 1352 aa, Megasphaera sp.
MKKRNREEYYVGLDIGTSSVGWAVATPDYRIPKFRGHKMWGSRLFAEGKRAAERRQFRTNRRRLARRRDRLQILEELFAEEMAKVDNTFFMRLKESKFFLEDKTVKEKHILFSTDKFDADRFYKDNPTIYHVRKRLMEEEPQDIRELFLAVHHILKYRGHFLFAGSLEQNGASIEELVRTLLGKQGLAILDDTIDSNEMVNILKNTGETKSDRKKDVQELWNPLKDKVKKAQAAEMAGLVLGLKSDISKLFANSDYKDLDSSIKNINFSSGDYEEKRDDYANSIGDDIVLLDTMKALYDTLILSQILQGKRSISAAKVEDYNTHKEQLRALKAILKPHKRLYNEMFRENNKKDLSNYVAYISSYSEGKRVNREGFYKYVQAVLKQVDDSDSKQAILEAIRLETFLPLLRVKDNAVIPHQIHQAELEAILETARKKYNFLNDVSDGVSVKDKIIQLFTFRIPYYVGPLNPHSGETVADRKQGTGWVVRKQRGKVYPWNFADMVDVKASAEAFITNLTNKCTYLIGEDVLPKRSLLYSEFMLLNELNMIKYDGHELPVAIKQLYIEQVFKQEHKKQTKGRVLDFLKRNGLITGSATAVITGMDDAIKGDLQSYRDMVRIFGAGFDHSMAERIIRWVTLFGEAKDILENKIREVYGNSISDSQMRAIKKLKYADWGRLSQAFLIAVKGCDKSGVERNIITCLRASSQNLMEILSDQGTYIKQIKAWNHQHTTNMMDTLDYQLVDDLYVAPSVKRSIWQSLCIVEELVKIMGQAPKKIFVEVTRTKQAEKTKKDSRKKRLVELYTAIGKEGAAWKKEIEAHQAGDFRRKKLYLYYTQMGRCMYSNEPIAMDALFTSAYDIDHIYPQSLTKDGSWDNLVLVKSQLNKEKSDQYPLRPAIREKNKAHWQYLCRAGFISEKKYERLMRTTELTAEELSGFIARQLVETSQATKAVTGLLERIYTNTEICFVKAETVSQFRHQHNFIKIRELNNYHHAKDAYLNIVVGNVYHEKFTKNPWEFIARSTERRPYNLNRMYDFDLLKQGRVIWQVPKSLETVQAMMKSNDVRITKKLLVQKGELYDATITKAHKAKEGTYFPLKGADARLRDVHRYGGYEKIKIAYYSVFSCREKASNTIHTLIIPIPVYKAGLLQTEADLTAYAWQTKQKTKPIKDIYSAITPIYKKLCINTVVKIDGFKYFLGGKTGDYMWLDPAIPVVLDEQAAAYLKAISKVGRADDVENTAQAIDLITAEANEAFYDVLLKKMEAKIFAKAYQTIVEKLASETARERFRELSIGAQCSCLLEILNLLANNKTTFTFFKDKMGVTMSRRKQPMDLTKLEECIVYETSITGLYEKAVSLL

SEQ ID NO: 224 - protein, 650 aa, Haemophilus pittmaniae
MENKNLHYILGLDLGIASVGWAVVEIDKEENPLCLIDVGVRTFERAEVPKTGESLALSRRLARSARRLTQRRVARLKKAKRLLKLENILLSTDERLPHQVWQLRVEGLDRKLKRQEWAAVLLHLIKHRGYLSQRKNESKSENKELGALLSGVASNHELLQQTTYRTPAELAVKKFEVEEGHIRNQQGAYTHTFSRLDLLAEMELLFSRQQHFGNPFASEKLLENLTALLMWQKPALSGEAILKMLGKCTFEDEYKAAKNTYTAERFVWITKLNNLRIQENGLERALNDNERLILIEQPYEKAKLTYAQVRSILNLSDEAIFKGLRYSGEDKKAIETKTTLMEMKAYHQIRKVLEGNNLKAEWTELKENSTLLDEIGTAFSLYKTDEDISTYLAGKLSQPVLNALLENLSFDKFIQLSLKALYKLLPLMQQGLRYDEACHEMYGDHYGKKTYGKKTEENHYFLPQIPADEIRNPVVLRTLTQARKVINGVVRLYGSPARIHIETGREVGKSYKDRRELEKRQEENRKQRENAIKEFKEYFPHFAGEPKAKDILKMRLYKQQNAKCLYSGKPIELHRLLEKGYVEVDHALPFSRTWDDSFNNKVLVLANENQNKGNLTPFEWLDGKHNSERWRAFKALVETSAFPYAKNNAS

SEQ ID NO: 225 - protein, 1062 aa, Ralstonia syzygii
MAEKQHRWGLDIGTNSIGWAVIALIEGRPAGLVATGSRIFSDGRNPKDGSSLAVERRGPRQMRRRRDRYLRRRDRFMQALINVGLMPGDAAARKALVTENPYVLRQRGLDQALTLPEFGRALFHLNQRRGFQSNRKTDRATAKESGKVKNAIAAFRAGMGNARTVGEALARRLEDGRPVRARMVGQGKDEHYELYIAREWIAQEFDALWASQQRFHAEVLADAARDRLRAILLFQRKLLPVPVGKCFLEPNQPRVAAALPSAQRFRLMQELNHLRVMTLADKRERPLSFQERNDLLAQLVARPKCGFDMLRKIVFGANKEAYRFTIESERRKELKGCDTAAKLAKVNALGTRWQALSLDEQDRLVCLLLDGENDAVLADALREHYGLTDAQIDTLLGLSFEDGHMRLGRSALLRVLDALESGRDEQGLPLSYDKAVVAAGYPAHTADLENGERDALPYYGELLWRYTQDAPTAKNDAERKFGKIANPTVHIGLNQLRKLVNALIQRYGKPAQIVVELARNLKAGLEEKERIKKQQTANLERNERIRQKLQDAGVPDNRENRLRMRLFEELGQGNGLGTPCIYSGRQISLQRLFSNDVQVDHILPFSKTLDDSFANKVLAQHDANRYKGNRGPFEAFGANRDGYAWDDIRARAAVLPRNKRNRFAETAMQDWLHNETDFLARQLTDTAYLSRVARQYLTAICSKDDVYVSPGRLTAMLRAKWGLNRVLDGVMEEQGRPAVKNRDDHRHHAIDAVVIGATDRAMLQQVATLAARAREQDAERLIGDMPTPWPNFLEDVRAAVARCVVSHKPDHGPEGGLHNDTAYGIVAGPFEDGRYRVRHRVSLFDLKPGDLSNVRCDAPLQAELEPIFEQDDARAREVALTALAERYRQRKVWLEELMSVLPIRPRGEDGKTLPDSAPYKAYKGDSNYCYELFINERGRWDGELISTFRANQAAYRRFRNDPARFRRYTAGGRPLLMRLCINDYIAVGTAAERTIFRVVKMSENKITLAEHFEGGTLKQRDADKDDPFKYLTKSPGALRDLGARRIFVDLIGRVLDPGIKGD

SEQ ID NO: 226 - protein, 1052 aa, Haemophilus parainfluenzae
MENKNLHYILGLDLGIASVGWAVVEIDEKENPLRLIDVGVRTFERAETQKGESLALSRRSARSARRLTQRRVARLKKAKRLLKSENILLSTDERLPHQVWQLRVEGLDRKLERQEWAAVLLHLIKHRGYLSQRKNESKSENKELGALLSGVASNHELLQQATYRTPAELAVKKFEVEEGHIRNQQGAYTHTFSRLDLLAEMELLFSRQQHFGNPFASEKLLENLTALLMWQKPALSGEDILKMLGKCTFEDEYKAAKNTYTAERFVWITKLNNLRIQENGLERALSDNERLMLIEQPYEKAKLTYAQVRSILNLSDDAIFKGVRYSGEDKKAIETKTTLMEMKAYHQIRKVLEGNNLKAEWVALKANPTLLDEIGTAFSLYKTDEDISAYLAGKLSQPVLNALLENLSFDKFIQLSLKALYKLLPLMQQGLRYDEACREIYGDHYGKKTEETHHFLPQIPADEIRNPVVLRTLTQARKVINGVVRLYGSPARIHIETGREVGKSYKDRHELKKRQEENRKQREKTISEIKTLFPNFSGEPKGKDILKMRLYYQQNAKCLYSGKPLELHRLFEQKYVEVDHALPLSRTWDDSFNNKVLVLANENQNKGNLTPFEWLDGKNNSERWRTFKALVETSAFPYAKKQRILSQKLDEKGFIERNLNDTRYVARFLCNFIADNMHLTGEGKRKVFASNGQITALLRRRWGLAKSREDNDRHHALDAVLVACSTVAMQQKITRFVRFKAGDVFTGERIDRETGEIIPLHFPTPWQFFKQEVEIRIFSDNPKLELENRLPDRPQANHEFVQPLFVSRMPTRKMTGQGHMETVKSAKRLNEGISMIKMPLTKLKLKDLELMVNREREKDLYDALKTRLEAFNDDPAKAFAEPFMKKGGAIVKSVRVEQVQKSGVLVRQGNGVADNASMVRVDVFTKDGKYFLVPIYTWQVAKGILPNKAVIQGKDEEDWEDIDDATFQFSLHPNDLISVKTKKDEFLGYFNGLNRHTGGINIRTHDLEKSKGKQGIFEGIGVKIALSFEKYQIDELGKNIRLCKPSKRQPVR

SEQ ID NO: 227 - protein, 1331 aa, Lactobacillus sanfranciscensis
MNKQPYNIGLDIGTSSVGWSATELDNRLLHIKGHNGIGVRLFKEGESAADRRGFRTTRRRLARRKWRLRLLNEIFATEIAKVDPSFFARLKQSNVSPKDPNKTMFENILFDDENLDDQKFHHDYKTIYHLRQAIINHPEQKFDIRLIYLAMHHIIKYRGHFLNQANVQDFKGGKIDLEKSFKALNDIFENQGRDLRLVTDKANQYVKVLSDNAKTRSDRKKELSKLLYVPIDKDTDKNSKKVTGEILKAILGNKAKFDVIFGIEVENPKEWVLTFNSDDFDDKIEGLSSQMTDEDSEILLILKELYFALNLSDILNNSVTDKNAKTLSEAMINRYDDHKNQLAMLKKVIDSSDKKHAKELKEAYSAYIDGENNKKISFEDLKKRIQKNLVDSELSQKINDLLDHDYFLPKQRSKENGAIPHQLQQQELDQIIESQKQYYPFLAELNPNEKRSRQAKYKLDELVAFRVPYYVGPMVEVTDSNQENNGKFAWMIRKEQGEITPWNFDEKVDRTETATKFITRMTTTDTYLIGEPVLPKNSLLYQKFVVLNELNNLKINQEIITPGQKQYLYEHVMKKNKRVTLKKIADALVIKGDYPYAPEVKGTTDQKNLNNGLTTYIDLAKIFGNELDDVDREADFEKIIEWSTIFEDQHIFALKLQELKWLTEKQRNQVVKLRYQGWGKLSKELLAGLVDDNGQRIIDLLWSDNQNFMQIVNQKSFKESIADHNGAHLEEKNLKDVINDLYTSPQNKKAIRQVILVVDDIINAVGYEPANIMMEFAREDSNDHRLTNSRSRQLENVYKDITNSWFDNDSVKDELEDKIKNKDKFTDRLYLYFTQGGKDLYTGEPLNIDDLSSYDIDHILPQSFILDNSLDNRVLTSQRNNRVSKEDQLPGELFGTKMHAFWKRLKAAHLISNKKYYNLTLTPNSISKFNNQGRFINRQLVETRQVIKLAAEILHNRYSEEKGTNIVTIKANLTHHMREKFNFYKNRNVNDYHHAFDAYLTAFVGNWLLQQYPKLKPYFVYGDFAKTEINNLKSFNMLYKFEQAHQLNEKDGKIAKDADALLGYMKNVYHFKKMLVTKKLETNHGALFKQTLYPSPAHDIKKRQLIKPKDNRPTDIYGGYTHEERKYMSLVKVIGKKDNEYRMANVPLLKINKNNDIKEILKSQFSNKKFEIVLPKVLKNQLFSENGALFVIGSKGYKYNANQLVLSDLDMKLLNDLSNNKSIDEVTINQLFKNIVDSTNKYMPLYEIKNLNEVVEKFNNLEFNDKKKTITDFLLATHANPTMSNLKNIGLPSYFGRFTSGNAGIKLSENANVIYQSPTGLFSRKVKISDF

SEQ ID NO: 228 - protein, 1473 aa, Flavobacterium branchiophilum
MAKILGLDLGTNSIGWAVVERENIDFSLIDKGVRIFSEGVKSEKGIESSRAAERTGYRSARKIKYRRKLRKYETLKVLSLNRMCPLSIEEVEEWKKSGFKDYPLNPEFLKWLSTDEESNVNPYFFRDRASKHKVSLFELGRAFYHIAQRRGFLSNRLDQSAEGILEEHCPKIEAIVEDLISIDEISTNITDYFFETGILDSNEKNGYAKDLDEGDKKLVSLYKSLLAILKKNESDFENCKSEIIERLNKKDVLGKVKGKIKDISQAMLDGNYKTLGQYFYSLYSKEKIRNQYTSREEHYLSEFITICKVQGIDQINEEEKINEKKFDGLAKDLYKAIFFQRPLKSQKGLIGKCSFEKSKSRCAISHPDFEEYRMWTYLNTIKIGTQSDKKLRFLTQDEKLKLVPKFYRKNDFNFDVLAKELIEKGSSFGFYKSSKKNDFFYWFNYKPTDTVAACQVAASLKNAIGEDWKTKSFKYQTINSNKEQVSRTVDYKDLWHLLTVATSDVYLYEFAIDKLGLDEKNAKAFSKTKLKKDFASLSLSAINKILPYLKEGLLYSHAVFVANIENIVDENIWKDEKQRDYIKTQISEIIENYTLEKSRFEIINGLLKEYKSENEDGKRVYYSKEAEQSFENDLKKKLVLFYKSNEIENKEQQETIFNELLPIFIQQLKDYEFIKIQRLDQKVLIFLKGKNETGQIFCTEEKGTAEEKEKKIKNRLKKLYHPSDIEKFKKKIIKDEFGNEKIVLGSPLTPSIKNPMAMRALHQLRKVLNALILEGQIDEKTIIHIEMARELNDANKRKGIQDYQNDNKKFREDAIKEIKKLYFEDCKKEVEPTEDDILRYQLWMEQNRSEIYEEGKNISICDIIGSNPAYDIEHTIPRSRSQDNSQMNKTLCSQRFNREVKKQSMPIELNNHLEILPRIAHWKEEADNLTREIEIISRSIKAAATKEIKDKKIRRRHYLTLKRDYLQGKYDRFIWEEPKVGFKNSQIPDTGIITKYAQAYLKSYFKKVESVKGGMVAEFRKIWGIQESFIDENGMKHYKVKDRSKHTHHTIDAITIACMTKEKYDVLAHAWTLEDQQNKKEARSIIEASKPWKTFKEDLLKIEEEILVSHYTPDNVKKQAKKIVRVRGKKQFVAEVERDVNGKAVPKKAASGKTIYKLDGEGKKLPRLQQGDTIRGSLHQDSIYGAIKNPLNTDEIKYVIRKDLESIKGSDVESIVDEVVKEKIKEAIANKVLLLSSNAQQKNKLVGTVWMNEEKRIAINKVRIYANSVKNPLHIKEHSLLSKSKHVHKQKVYGQNDENYAMAIYELDGKRDFELINIFNLAKLIKQGQGFYPLHKKKEIKGKIVFVPIEKRNKRDVVLKRGQQVVFYDKEVENPKDISEIVDFKGRIYIIEGLSIQRIVRPSGKVDEYGVIMLRYFKEARKADDIKQDNFKPDGVFKLGENKPTRKMNHNQFTAFVEGIDFKVLPSGKFEKI

SEQ ID NO: 229 - protein, 933 aa, Mycoplasma iowae
SVRDYSDGPGSEKSPTPYGLWRLNKEGKVEKIGENLWDVLVGKCTIYGNDDSIKDEKTKLRGGKNSPIAEVFNFINDLTNIYLFSSSKLKLNSKTKLSILDEFNISLKTSKPIKSFSEKKLVKHIISTTEFKDINFDDVYGYRIDTSKKPLFTKLENTITIAKWLLDNNVYNELNIYDQEDLIKINNIFVILQKSMDINKRAQLVSDEYKIDLPICLELVKKIKGVMQTHSFSYKAMLEYIPVGIKYNDLETGEDTSINASTYFVDKINNLNTKLLFNGRPRKYIPKNIFEDGIISPTSKRAFIQTINVLNKIIKVYSKDYDIDNIAIELPRDKNTAEERKKISSNQKKAGEEIAEVLKFAGLNVEEYTSKLNSKTKLKLKLLKEQNYKDIYDGQEIDVIDVIKNSNKYHEEHIIPYSLCFIDSRRNKVLTKFENNKQKGNKTPFQWLSSIGKYAEFKDRVEKLFVEQKISKAKKELLLFEQDPRTEMLGFIEKNLSDTRYASKLVFDTFRDFFKVNNPNVKIKVINGALTNYARYNLFATYKDGLLERKGIMKQREFYEHHGIDATILAFLGSNHKINQLLKLSHKFKKQDDNKIYDENTGELIEFTKDFLSDEARKKAMELSKQIFEIPCKFSRPIYRKSNVSFSNETLISMKWIDDKYTKGVKINKLSLVNKDLDLNEYFADYETNEMKNLICYQEDKTLYNKLKNIYDKYNNFVENSNIKPVKNPFINYMISNFSSDDSKIQNFKHIIFYDHKGNKKFVKSLKVCGDEKNLSNIVLRKDQKDIMNSKKIKKSGILESLNPISARIYKDNKGKYITIPINSLVLNWTKKGLEIDNEKLCNILKSKNIFNNQFIEINAGQSIINNENKLFYFVGGGDFKVNKLEIKSQFCDNEIFFPRKQMNISIATIIDNYKLCEVDELGKIYNIRKIVL

SEQ ID NO: 230 - protein, 1358 aa, Acidaminococcus intestini; identical to SEQ ID NO: 94

SEQ ID NO: 231 - protein, 983 aa, Campylobacter jejuni
MARILAFDIGISSIGWAFSENDELKDCGVRIFTKAENPKTGESLALPRRLARSARKRLARRKARLNHLKHLIANEFKLNYEDYQSFDESLAKAYKGSLISPYELRFRALNELLSKQDFARVILHIAKRRGYDDIKNSDDKEKGAILKAIKQNEEKLANYQSVGEYLYKEYFQKFKENSKEFTNVRNKKESYERCIAQSFLKDELKLIFKKQREFGFSFSKKFEEEVLSVAFYKRALKDFSHLVGNCSFFTDEKRAPKNSPLAFMFVALTRIINLLNNLKNTEGILYTKDDLNALLNEVLKNGTLTYKQTKKLLGLSDDYEFKGEKGTYFIEFKKYKEFIKALGEHNLSQDDLNEIAKDITLIKDEIKLKKALAKYDLNQNQIDSLSKLEFKDHLNISFKALKLVTPLMLEGKKYDEACNELNLKVAINEDKKDFLPAFNETYYKDEVTNPVVLRAIKEYRKVLNALLKKYGKVHKINIELAREVGKNHSQRAKIEKEQNENYKAKKDAELECEKLGLKINSKNILKLRLFKEQKEFCAYSGEKIKISDLQDEKMLEIDHIYPYSRSFDDSYMNKVLVFTKQNQEKLNQTPFEAFGNDSAKWQKIEVLAKNLPTKKQKRILDKNYKDKEQKNFKDRNLNDTRYIARLVLNYTKDYLDFLPLSDDENTKLNDTQKGSKVHVEAKSGMLTSALRHTWGFSAKDRNNHLHHAIDAVIIAYANNSIVKAFSDFKKEQESNSAELYAKKISELDYKNKRKFFEPFSGFRQKVLDKIDEIFVSKPERKKPSGALHEETFRKEEFYQSYGGKEGVLKALELGKIRKVNGKIVKNGDMFRVDIFKHKKTNKFYAVPIYTMDFALKVLPNKAVARSKKGEIKDWILMDENYEFCFSLYKDSLILIQTKDMQEPEFVYYNAFTSSTVSLIVSKHDNKFETLSKNQKILFKNANEKEVIAKSIGIQNLKVFEKYIVSALGEVTKAEFRQREDFKK

SEQ ID NO: 232 - protein, 1338 aa, Streptococcus macacae
MTKPYSIGLDIGTNSVGWAVVTDGYKVPAKKMKVLGNTDKSHIKKNLLGALLFDSGNTAKDRRLKRTARRRYTRRRNRILYLQEIFAEEMAKADESFFQRLNESFLTNDDKEFDSHPIFGNKAEEEAHHHKFPTIFHLRKHLADSTEKSDLRLIYLALAHMIKFRGHFLIEGQLKAENTNVQTLFDDFVEVYDKTVEESHLSEISVSSILTEKISKSRRLENLIKYYPTEKKNTLFGNLIALSLGLQPNFKTNFKLSEDAKLQFSKDTYEEDLGELLGKIGDNYADLFISAKNLYDAILLSGILTIDDNTTKAPLSASMIKRYEEHQEDLAQLKKFIRQNLPDQYSEVFSDKTKDGYAGYIDGKTNQEAFYKYIKNMLSKTEGADYFLDKIDREDFLRKQRTFDNGSVPHQIHLQEMHAILRRQGEYYPFLKENQDKIEKILTFRIPYYVGPLARKGSRFAWAEYKADKKVTPWNFDDILDKEKSAEEFITRMTLNDLYLPEEKVLPKHSLVYETFNVYNELTKVKYVNEQGKAIFFDANMKQEIFDHVFKENRKVTKDKLLNYLNKEFEEFRIVNLTGLDKENKAFNSSLGTYHDLRKILDKSFLDDKVNEKIIEDIIQTLTLFEDREMIRQRLQKYSDIFTTQQLKKLERRHYTGWGRLSAKLINGIRDKQSNKTILGYLIDDGYSNRNFMQLINDDSLPFKEEIARAQVIGETDDLNQLVSDIAGSPAIKKGILQSLKIVDELVKVMGHNPANIVIEMARENQTTAKGRRSSQQRYKRLEEAIKNLDHDLNHKILKEHPTDNQALQNDRLFLYYLQNGRDMYTEDPLDINRLSDYDIDHIIPQSFIKDDSIDNKVLVSSAKNRGKSDNVPSEDVVNRMRPFWNKLLSCGLISQRKYSNLTKKELKPDDKAGFIKRQLVETRQITKHVAQILDARFNTKRDENKKVIRDVKIITLKSNLVSQFRKDFKFYKVREINDYHHAHDAYLNAVIGKALLDVYPQLEPEFVYGEYPHFHGYKENKATAKKFFYSNIMNFFKKDDIRTDENGEIVWKKDEHISNIKRVLSYPQVNIVKKVEIQTVGQNGGLFDDNPKSPLEVTPSKLVPLKKELNPKKYGGYQKPTTAYPVLLITDTKQLIPISVMNKKQFEQNPVKFLRDRGYQQVGKNDFIKLPKYTLVDIGDGIKRLWASSKEIHKGNQLVVSKKSQILLYHAHHLDSDLSNDYLQNHNQQFDVLFNEIISFSKKCKLGKEHIQKIENVYSNKKNSASIEELAESFIKLLGFTQLGATSPFNFLGVKLNQKQYKGKKDYILPCTEGTLIRQSITGLYETRVDLSKIGED

SEQ ID NO: 233 - protein, 1265 aa, Mycoplasma ovipneumoniae
MHNKKNITIGFDLGIASIGWAIIDSTTSKILDWGTRTFEERKTANERRAFRSTRRNIRRKAYRNQRFINLILKYKDLFELKNISDIQRANKKDTENYEKIISFFTEIYKKCAAKHSNILEVKVKALDSKIEKLDLIWILHDYLENRGFFYDLEEENVADKYEGIEHPSILLYDFFKKNGFFKSNSSIPKDLGGYSFSNLQWVNEIKKLFEVQEINPEFSEKFLNLFTSVRDYAKGPGSEHSASEYGIFQKDEKGKVFKKYDNIWDKTIGKCSFFVEENRSPVNYPSYEIFNLLNQLINLSTDLKTTNKKIWQLSSNDRNELLDELLKVKEKAKIISISLKKNEIKKIILKDFGFEKSDIDDQDTIEGRKIIKEEPTTKLEVTKHLLATIYSHSSDSNWININNILEFLPYLDAICIILDREKSRGQDEVLKKLTEKNIFEVLKIDREKQLDFVKSIFSNTKFNFKKIGNFSLKAIREFLPKMFEQNKNSEYLKWKDEEIRRKWEEQKSKLGKTDKKTKYLNPRIFQDEIISPGTKNTFEQAVLVLNQIIKKYSKENIIDAIIIESPREKNDKKTIEEIKKRNKKGKGKTLEKLFQILNLENKGYKLSDLETKPAKLLDRLRFYHQQDGIDLYTLDKINIDQLINGSQKYEIEHIIPYSMSYDNSQANKILTEKAENLKKGKLIASEYIKRNGDEFYNKYYEKAKELFINKYKKNKKLDSYVDLDEDSAKNRFRFLTLQDYDEFQVEFLARNLNDTRYSTKLFYHALVEHFENNEFFTYIDENSSKHKVKISTIKGHVTKYFRAKPVQKNNGPNENLNNNKPEKIEKNRENNEHHAVDAAIVAIIGNKNPQIANLLTLADNKTDKKFLLHDENYKENIETGELVKIPKFEVDKLAKVEDLKKIIQEKYEEAKKHTAIKFSRKTRTILNGGLSDETLYGFKYDEKEDKYFKIIKKKLVTSKNEELKKYFENPFGKKADGKSEYTVLMAQSHLSEFNKLKEIFEKYNGFSNKTGNAFVEYMNDLALKEPTLKAEIESAKSVEKLLYYNFKPSDQFTYHDNINNKSFKRFYKNIRIIEYKSIPIKFKILSKHDGGKSFKDTLFSLYSLVYKVYENGKESYKSIPVTSQMRNFGIDEFDFLDENLYNKEKLDIYKSDFAKPIPVNCKPVFVLKKGSILKKKSLDIDDFKETKETEEGNYYFISTISKRFNRDTAYGLKPLKLSVVKPVAEPSTNPIFKEYIPIHLDELGNEYPVKIKEHTDDEKLMCTIK

SEQ ID NO: 234 - protein, 1535 aa, Flavobacterium columnare
MTKILGLDLGTNSIGWAIRDTENEGINQILDKGARIFSEGVKSENGKEISRAAERTAYRSARKIKYRRKLRKYETLKVLSINGMCPLSVEEVEQWKKSGFKEYPLNPEFLDWLRTNEDKNINPYLFRDKASKQKVTLFELGRALYHIAQRRGFLSNRLDQSAEGVFEEHNPQIQNLIEDLDSSNTILNELKEYYINLGIIDETEKSGFKKDLDEGEKKLKSLYNSLVAITKKNANDIETCKQELIARLNKKEDLGKVKGKIKDISQAMLDRNFKTLGQYFFSLYNKERIRNQYTSREEHYLEEFIIICQTQGIEGINTNEKLPEKKFTGLAKDLYRAIFFQRPLKSQKGLIGKCSFEKNKSRCAVSHPDYEEFRMWSYLNTIKIGTQSEKTLRFLTLEEKLKLVPKFYRKSDFNFEVLAKELVEKGASFGYYKSSKKNEFFYWFNYKPTDSVSACVVSASLENAIGKDWKIKTFEYQTRNTEKNEVTKSVDYKDLWHLLSVATSDTYLYDFAIEKLKLEPKNAKAFSKTKLKKDFASLSLAAIAKILPYLKQGLLYSHAVFMANIENIVDADIWKDEEQQKFIQSKIVELVDNYIVEKSKLELINGLLKIYNTEDKEGRKVYYSKEAESLFEADLRKKLVPFYKANIIIEEHEQEIIFQDLFPILMDQLKKQEFIKIGRLDKQIEAFLEGENEEGQIFCNHTDKLKKLYHPSDIEVFKKKTIKDEWGNEKVVLGSPLTTSIKNPMAMRALHQLRKVLNTLIANDQIDEDTRIHIEMARELNDANKRKGIQDFQNENKKFREEAIKEIKKLYLEECHKDVNPTEDDILRYQLWLEQGKCEIYEEGNNISICDIIGSNPSYDIEHTIPRSISQDNSQMNKTLCSLKFNRSIKKQKMPVELSNYNDILPRIAHWKKEAEELTRQIETISRSIKSAATKVAKDKNIRKRHYLTLKRDYILGKYERFTWEEPKVGFKNSQIPDTGIITKYAQAYLKSYFKRVESVKGGAVAEFRKLWGIQESFIDENWWKHYKDKDRDKHTHHTIDAITIACMPKDKYDLLAHAWRLEDEQDKKAAKVLIEQAKPWKTFKEDIEKIETEILVSHFTPDNVKKQSKSIIKNRGKKVYVLKNELPVNFKNKIEGKDYFKLKFDSKILYKIPKKKEKQTDTFYEELPKNYLNGVEGKDYFKINTTGKTFYKIPIFNQGDTIRGSLHQETTYGAIKLPDIDIETKKPLHTDKGGFILKKDIKGNEIVFFVVRKEISKISENDVQNIVDNVVRKKIENAIANSLITFKIVKKKKVAVIKEGVTIWMREPNIEKGIEGIPIKKVRIITNSVKNPIEIKVHSPLSKSRHKHKQKVYGQNDENYAMALYELDGKREFELINNFNLAKLLKQSQSYYPLHKEKEIKGKKILVPIEKRNNKDVILKRGQQVVFYDKTVENPKDISEIIDFRERIYIIEGLTIQRQKDKKTSKVNEYGIIQLRHFKEARKSEEISKDNFKPDGEFKINENKPTRKMNHNQFTAFVEGIDFKVLPSGKFQKI

SEQ ID NO: 235 - protein, 1459 aa, Flavobacterium columnare
MKFNLGLDIGTNSIGWALVNEDYENKKGKIIAAGSRIIPMTQDILDKFGSGAITETQTALRTDYRSKRKLIQRFLLRRERLHRVLNVLDFLPKHYAESIDFEKYFGKFLPNTEPKLAYNQNQFIFQNSFLEMLKEFQEKHPELLTNNKKIPYDWTIYYLRKKALNQRIEKEELAWLLLQFNQKRGYNQLRDEEEESVPNKQVEFYSLKIIDVVADQPKEGRDKRWYSINLENGWTYRRESKTPLFNWEGKTKDFIVTTDLNQDGSIKKDKEGKEKRSFRAPSEGDWTLLKKKTEKEIYESGKTLGTYIYDALLNTPDLKIKGDFIRTIDRSIYKEELQQIINKQKEYHLELNSSKLYKACLEELYPKNEIYKSALKNKDIAYLFINDILYYQRPLKAPKYNIGKCTYESRTFKKEDKKIREYIPAVAKSHPLFQEFRLWQWIKNLKIYEKLSSDNCTDFFLTNEQDFENLFEFLWNKKEIDHKGILEYLVKTKFPDLKPKQVKTKVKEYRWNYVYDHEKDESKTYPCGETYFLLKNKLDKIYNAQDDFLDKERLYNLWHIIYSVTDKKQYEKALAKFALKNHLDTKSFVNTFKRIPPFKNDYAIYSLKAIKKLLPLMRVGKYWNYDDIDPITKQKIQCIITGEENDTISTLVREKTNHFSNENDFKNLPLWLAGYIVYNSHNESSEIEKWKSPQDIDTFLKKFKQHALRNPIVEQVVTETLRVVRDIWSKKGQGKKDFFNEIHIELGKDLKNPVDKRRKLSSTNTKNESTNTRIKALLIELFTQGVENVKPNSPKHQEILKIFEEGALNSGIEIEEDIIKISNTDQPTKKQLELYILWLEHKYKSPYTGQSIPLSKLFTPNYEIEHIIPRSKYYDDNLSNKVICETEINRLKNNQLGYEFINNHEIREVTLEEGKTIRLLSPEQYWNFVTTYYAKNKAKRENLLLKELPVQMVEKQLNDTRYVSKYVMQLLSKIVRKEDGTDNGINSTNILSISGKMTRALKNDWDLNDVWNDLLLYRFERLNTITKTNLFTTYSEQKQKRMPIVPDQYAKGFHKKRLDHRHHALDAIVIACITRNHINYMNNQNIQGEKLKKNAIEKENYREILQKSRLDIRAQLCEKKYNDNDPTKYNWVFIKPWADFTENTKDILESIIPSFKQNLRIINKTVNYYEKYNENGKKVKVRQIKGDNWAIRKPLHKETISGKVHLSYKTPAKGKILTATRKVLDSSMDFKSIEKITDTGIQKILKNYLEYKKSPELAFSPEGIEELNATITKYNNGFHHKPIYKVRIYEEGVKFPLGNKGNKKSKYVEAEKGTNLFFAIYKDQENNRYFETIPFNDVLETLKKGMSAVPEKNQEENTLVFALSPQDLVFVPTLDEIENPDIVDFKNLTKDQTNRIYKMVSSSGKQCFFIKAEVATSIVNKMEFSTSNKMENSIEGIQIKSNCWKLKLDRLGTITRVIK

SEQ ID NO: 236 - protein, 1389 aa, Oenococcus kitaharae
MARDYSVGLDIGTSSVGWAAIDNKYHLIRAKSKNLIGVRLFDSAVTAEKRRGYRTTRRRLSRRHWRLRLLNDIFAGPLTDFGDENFLARLKYSWVHPQDQSNQAHFAAGLLFDSKEQDKDFYRKYPTIYHLRLALMNDDQKHDLREVYLAIHHLVKYRGHFLIEGDVKADSAFDVHTFADAIQRYAESNNSDENLLGKIDEKKLSAALTDKHGSKSQRAETAETAFDILDLQSKKQIQAILKSVVGNQANLMAIFGLDSSAISKDEQKNYKFSFDDADIDEKIADSEALLSDTEFEFLCDLKAAFDGLTLKMLLGDDKTVSAAMVRRFNEHQKDWEYIKSHIRNAKNAGNGLYEKSKKFDGINAAYLALQSDNEDDRKKAKKIFQDEISSADIPDDVKADFLKKIDDDQFLPIQRTKNNGTIPHQLHRNELEQIIEKQGIYYPFLKDTYQENSHELNKITALINFRVPYYVGPLVEEEQKIADDGKNIPDPTNHWMVRKSNDTITPWNLSQVVDLDKSGRRFIERLTGTDTYLIGEPTLPKNSLLYQKFDVLQELNNIRVSGRRLDIRAKQDAFEHLFKVQKTVSATNLKDFLVQAGYISEDTQIEGLADVNGKNFNNALTTYNYLVSVLGREFVENPSNEELLEEITELQTVFEDKKVLRRQLDQLDGLSDHNREKLSRKHYTGWGRISKKLLTTKIVQNADKIDNQTFDVPRMNQSIIDTLYNTKMNLMEIINNAEDDFGVRAWIDKQNTTDGDEQDVYSLIDELAGPKEIKRGIVQSFRILDDITKAVGYAPKRVYLEFARKTQESHLTNSRKNQLSTLLKNAGLSELVTQVSQYDAAALQNDRLYLYFLQQGKDMYSGEKLNLDNLSNYDIDHIIPQAYTKDNSLDNRVLVSNITNRRKSDSSNYLPALIDKMRPFWSVLSKQGLLSKHKFANLTRTRDFDDMEKERFIARSLVETRQIIKNVASLIDSHFGGETKAVAIRSSLTADMRRYVDIPKNRDINDYHHAFDALLFSTVGQYTENSGLMKKGQLSDSAGNQYNRYIKEWIHAARLNAQSQRVNPFGFVVGSMRNAAPGKLNPETGEITPEENADWSIADLDYLHKVMNFRKITVTRRLKDQKGQLYDESRYPSVLHDAKSKASINFDKHKPVDLYGGFSSAKPAYAALIKFKNKFRLVNVLRQWTYSDKNSEDYILEQIRGKYPKAEMVLSHIPYGQLVKKDGALVTISSATELHNFEQLWLPLADYKLINTLLKTKEDNLVDILHNRLDLPEMTIESAFYKAFDSILSFAFNRYALHQNALVKLQAHRDDFNALNYEDKQQTLERILDALHASPASSDLKKINLSSGFGRLFSPSHFTLADTDEFIFQSVTGLFSTQKTVAQLYQETK

SEQ ID NO: 237 - protein, 1425 aa, Prevotella micans
MIQKIFGLDLGTNSIGSSVRNLELGENLTEQLEFFSSDIFGSSVSKNSNGREYSLAGNRSAHRRSRGLNEARRRKLWATLDLLIEHGLCPMSPDSLMQWRTYDKQKGLYRQYPIEDKDFNAWIMLDFNGDGKPDYSSPYQLRRELVVRQFDFDQPIERYKLGRALYHIAQHRGFKSSKGETIADQEKNEKKPIAEEGADIANEMKASETKLSKGLVAYMQENHLKTVGEAFAKLEDERVRIRNNESYRAIRSQYQDEIKEIFTYQKKLSVESELYERLTSEKKGVGTIFYKRPLRSQRGNVGKCTLERNKPRCPIGRPEFEEFRAWTLINNIKIRETAGEPYKQLPIKLRQELLKDCFLSKVKADFKFEDIRKYIEKRLGLSFSNDDKTINYKDSVSIAACPVTVRMKKLLGENWANCRIDGEKRRQAHGKNNNNEHIVSYTEEDIWHVCYNAEDPEEVSNFARKALHWDENKIKELVRLWTSIPQGYAMLSLKAIRNINRMLLLGLKYSDAVLLAKLPDIVPVSDEDILAITKEFLQLEDKLNQEKQINNIVNSLIANYKSKLEENRFADHNYQYQLGEGDDEDINTQIKSHIGAKLWVQIGADEQTKIFQAVRSKYQDFFKSYKRKFVESPKLGELLVAFLTEKFPNVKSKQWERLYHPSQIAIYRPIPVDNDRSKLRLGNPNIGAIKNPTVMRVLNTLRRRVNQLLDDGVISPDETRVVVETARELNDANTKWALDRYNRIRRDENEKIRKILKELNPTTNSISEQDIDKARYIFEQCETDFYTDGKVPYYNKDIKKYKLWLEQGGQCLYTGQTINLTNLFNPNAFDMEHTIPKSISFDNSDQNLTLCESYYNRFIKKNNIPTDMPNYDKDVTINGKEYTAIKPRLQRWKERVDRLSRNVDFWKGQARRAQDKDRKDECIREKHLWDMELAYWKGKLERFTMTDVTDGFKNSQLVDTRVITRHAVLYLKSIFNHVEVQRGETTAEFRKILGLQSIDEKKDRSLHSHHAIDATMLTVIPSAAKRDRMLELFYKIEETKKALKNYNDNNKTGLNLELKGLEEKLDKEKKDCRVGRRVNDLDRFINENIIVSHHTKDQALTPAHRRLRKRGKIVGGKEHPRWQTGDSLRGEIHKASYYGAITQFAKDANGKVLMKDGQAQIDPTIYYVIRRELKYKRSTQDSGFTNWEDLEKVIVDTDLFGLMKGQFPEGTSFKDACEQGFYMIKKGKNGEGDVKTHRIRHVRCKAVKTALRIKEQTYKSSKDYKQFFYAAVGDLYVMCYYTDGKKRDFKIYSLYDISNHRKSGTEDIPKFITDKKGNHLPLDYKLRTGDMVLLYKDNPEELKDLDQVNLKRRLYKVNRFESEGLIILLTHHLSTTTERGCSIGKIENYQNLPTAIRCGIKTIKFLIMGKHRDFVIRNGNIEFKH

SEQ ID NO: 238 - protein, 1473 aa, Mucilaginibacter paludis
MKNILGLDLGTNSIGWALIEKDTDQKNGNILGTGSRIIPMSQDIKDEFGKGNSISQTADRTKFRSVRRLRERHLLRRERLHRVLNVLGFLPKHYADQIDFKKRLGKLVNETEPKLVYDNKNFIFKKSFEAMLSDFNQHQPLLLADGKKVPFDWTIYYLRKKALTEKIEKEELAWLILNFNQKRGYYQLRGEEEEENPNKMVAFHSLKIVEVIADESQKGKAETWYSLILENGWIYRRSSKTPLYDWKGKQRDFIVTTDLNDDGSIKTDKEGLEKRSFRAPVEDDWTLVKKKTEQEINRSHKTVGTYIYENLLQDPKQKIKGKLVRTIEREFYKDELKMILKNQQKFHPELNDEHLYINCVRELYRNNQAHQTILSKKDFVHLFIDDIIFYQRPLRSQKSSISNCTLEFRKYKNENGTDQTDYLKAIPKSHPLFQEFRLWQWIYNLGIYQKEDDTNVTDELIKNIDGYQDLFDFLNNKKEIRQDILIKFLVEQTGLKGKPLSSVVAKYRWNFVEDKIYPCNETGTQIRTRLAKVENTPEDFLTAETEIKLWHIIYSVNDKADYEKALKTFAEKHNLDTHSFVENFKKFPPFKSEYGSFSEKAIKKLLPLIRLGKYWSWENIDKKTQERIEKILTGEFDEAIKSRVRDKAIHLTEEDHFQGLQLWLASYVVYGRHSEADNLDKWHTVADLEDYLAEFRQHSLRNPIVEQVITETLRVVKDIWLQYGQGAKDFFSEIHIELAREMKNTGDERKRLTSLVTDNENTNLRIKVLLSELLNDGNVENVRPYSPMQQEALKIFEDGVLNSDIEIEDDILKISKMAQPTNTELKRYKLWLEQKYRSPYTGQIIPLNRLFTADYEIEHIIPQSRFFDDSFSNKIICESAVNQLKDKQLGLEFIKNHSGTIVKLGMGKTAKILDVESYNEFVKGNYTKNISKRNKLMLEEIPDKMIERQLNDTRYISKFIISALSNIVRSESNDDGFNSKNVLPGNGKITSRLKQDWGMNDIWNELILPRFERMNKITDSAVFTAWNENNQKFLPIVPLEFSKGFQKKRIDHRHHALDALVIAASTREHINLLNNEHAKSDKRFDLNRKLRKFEKVAYNDPKTGKRIEKEVPTIFLKPWETFTVDAKNSLESIIVSFKQNLRVINRATNYSESYNDENGALRLGKDGNPLKEKIKQSKGDSWAIRKPMHKDFVYGKVHLQNVKLPKDKFITAIRKSLDVTFDLKRIETITDTGIQKILKNYLHSKENKVELAFSPEGIEDMNQHIERYNDGKKHQPIHKVRVFEIGSRFSLGESGNKKTKFVEAAKGTNLFFAVYQDDNKGKRNYETIPLNIVIERQKLGLHSVPTEDAKGGKLLFHLSPNDMVYVPTSEELEDNLASVNIKRLNTAQRKRIYKVEKASGVECYFIRQDIAYLIKNYDAKTKIGELESQNKLQTTMTDDRLKITDVCVKLNIDRLGSIAETFLGNQYGASKKT

SEQ ID NO: 239 - protein, 1365 aa, Filifactor alocis
MTKEYYLGLDVGTNSVGWAVTDSQYNLCKFKKKDMWGIRLFESANTAKDRRLQRGNRRRLERKKQRIDLLQEIFSPEICKIDPTFFIRLNESRLHLEDKSNDFKYPLFIEKDYSDIEYYKEFPTIFHLRKHLIESEEKQDIRLIYLALHNIIKTRGHFLIDGDLQSAKQLRPILDTFLLSLQEEQNLSVSLSENQKDEYEEILKNRSIAKSEKVKKLKNLFEISDELEKEEKKAQSAVIENFCKFIVGNKGDVCKFLRVSKEELEIDSFSFSEGKYEDDIVKNLEEKVPEKVYLFEQMKAMYDWNILVDILETEEYISFAKVKQYEKHKTNLRLLRDIILKYCTKDEYNRMFNDEKEAGSYTAYVGKLKKNNKKYWIEKKRNPEEFYKSLGKLLDKIEPLKEDLEVLTMMIEECKNHTLLPIQKNKDNGVIPHQVHEVELKKILENAKKYYSFLTETDKDGYSVVQKIESIFRFRIPYYVGPLSTRHQEKGSNVWMVRKPGREDRIYPWNMEEIIDFEKSNENFITRMTNKCTYLIGEDVLPKHSLLYSKYMVLNELNNVKVRGKKLPTSLKQKVFEDLFENKSKVTGKNLLEYLQIQDKDIQIDDLSGFDKDFKTSLKSYLDFKKQIFGEEIEKESIQNMIEDIIKWITIYGNDKEMLKRVIRANYSNQLTEEQMKKITGFQYSGWGNFSKMFLKGISGSDVSTGETFDIITAMWETDNNLMQILSKKFTFMDNVEDFNSGKVGKIDKITYDSTVKEMFLSPENKRAVWQTIQVAEEIKKVMGCEPKKIFIEMARGGEKVKKRTKSRKAQLLELYAACEEDCRELIKEIEDRDERDFNSMKLFLYYTQFGKCMYSGDDIDINELIRGNSKWDRDHIYPQSKIKDDSIDNLVLVNKTYNAKKSNELLSEDIQKKMHSFWLSLLNKKLITKSKYDRLTRKGDFTDEELSGFIARQLVETRQSTKAIADIFKQIYSSEVVYVKSSLVSDFRKKPLNYLKSRRVNDYHHAKDAYLNIVVGNVYNKKFTSNPIQWMKKNRDTNYSLNKVFEHDVVINGEVIWEKCTYHEDTNTYDGGTLDRIRKIVERDNILYTEYAYCEKGELFNATIQNKNGNSTVSLKKGLDVKKYGGYFSANTSYFSLIEFEDKKGDRARHIIGVPIYIANMLEHSPSAFLEYCEQKGYQNVRILVEKIKKNSLLIINGYPLRIRGENEVDTSFKRAIQLKLDQKNYELVRNIEKFLEKYVEKKGNYPIDENRDHITHEKMNQLYEVLLSKMKKFNKKGMADPSDRIEKSKPKFIKLEDLIDKINVINKMLNLLRCDNDTKADLSLIELPKNAGSFVVKKNTIGKSKIILVNQSVTGLYENRREL

SEQ ID NO: 240 - protein, 1130 aa, Streptococcus macedonicus
MTNGKILGLDIGIASVGVGIIEAKTGKVVHANSRLFSAANAENNAERRGFRGSRRLNRRKKHRVKRVRDLFEKYGIVTDFRNLNLNPYELRVKGLTEQLTNEELFAALRTISKRRGISYLDDAEDDSTGSTDYAKSIDENRRLLKTKTPGQIQLERLEKYGQLRGNFTVYDENGEAHRLINVFSTSDYEKEARKILETQADYNKKITAEFIDDYVEILTQKRKYYHGPGNEKSRTDYGRFRTDGTTLENIFGILIGKCNFYPDEYRASKASYTAQEYNFLNDLNNLKVPTETGKLSTEQKESLVEFAKNTAILGPAKLLKEIAKILDCKVDEIKGYREDDKGKPDLHTFEPYRKLKFNLDSVNIDYLSREVLDKLADILTLNTEREGIEDAIKRNLPNQFTEEQISEIINVRKSQSTAFNKGWHSFSAKLMNELIPELYATSDEQMTILTRLEKFKVKKKSSKNIKTIDEKEITDEIYNPVVAKSVRQTIKIINAAVKKYGDFDKIVIEMPRDKNADDEKKFINKRNKENKKEKDDALKRAAYLYNGTDKLPDEVFHGNKQLETKIRLWYQQGERCLYSGKPIPIQELVHNSNNFEIDHILPLSLSFDDSLANKVLVYSWTNQEKGQKTPYQVIDSMDAAWSFREMKEYVLKQKGLGKKKRDYLLTTENIDKIEVKKKFIERNLVDTRYASRVVLNSLQSALRELGKDTKVSVVRGQFTSQLRRKWKIDKSRETYHHHAVDALIIAASSQLKLWEKQDNPMFVDYGNNQVVDKQTGEILSVSDNEYKELVFQPPYQGFVNTISSKGFEDEILFSYQVDSKYNRKVSDATIYSTRKAKIGKDKKEETYVLGKIKDIYSQNGFDTFVKKYNKDKTQFLMYQKDPLTWENVIEVILGDYPTTKKSEDGKNDVKCNPFEEYRRENGLICKYSKKGKGTPIKSLKYYDKKLGNCIDITPEESRNKVILQSINPWRADVYFNPETLKYELMGLKYSDLSFEKGTGNYHISQEKYDAIKEKEGIGKKSEFKFTLYRNDLILIKDIASGEQEIYRFLSRTMPNVNHYVELKPYDKEKFDNVQELVEALGEADKVGRCIKSLNKPNISIYKVRTDVLGNKYFVKKEGDKPKLDFKNNKK

SEQ ID NO: 241 - protein, 1367 aa, Streptococcus pyogenes
MDKKYSIGLDIGTNSVGWAVITDDYKVPSKKFKVLGNTDRHSIKKNLIGALLFGSGETAEATRLKRTARRRYTRRKNRICYLQEIFSNEMAKVDDSFFHRLEESFLVEEDKKHERHPIFGNIVDEVAYHEKYPTIYHLRKKLADSTDKADLRLIYLALAHMIKFRGHFLIEGDLNPDNSDVDKLFIQLVQIYNQLFEENPINASRVDAKAILSARLSKSRRLENLIAQLPGEKRNGLFGNLIALSLGLTPNFKSNFDLAEDAKLQLSKDTYDDDLDNLLAQIGDQYADLFLAAKNLSDAILLSDILRVNSEITKAPLSASMIKRYDEHHQDLTLLKALVRQQLPEKYKEIFFDQSKNGYAGYIDGGASQEEFYKFIKPILEKMDGTEELLVKLNREDLLRKQRTFDNGSIPHQIHLGELHAILRRQEDFYPFLKDNREKIEKILTFRIPYYVGPLARGNSRFAWMTRKSEETITPWNFEEVVDKGASAQSFIERMTNFDKNLPNEKVLPKHSLLYEYFTVYNELTKVKYVTEGMRKPAFLSGEQKKAIVDLLFKTNRKVTVKQLKEDYFKKIECFDSVEISGVEDRFNASLGAYHDLLKIIKDKDFLDNEENEDILEDIVLTLTLFEDRGMIEERLKTYAHLFDDKVMKQLKRRRYTGWGRLSRKLINGIRDKQSGKTILDFLKSDGFANRNFMQLIHDDSLTFKEDIQKAQVSGQGHSLHEQIANLAGSPAIKKGILQTVKIVDELVKVMGHKPENIVIEMARENQTTQKGQKNSRERMKRIEEGIKELGSQILKEHPVENTQLQNEKLYLYYLQNGRDMYVDQELDINRLSDYDVDHIVPQSFIKDDSIDNKVLTRSDKNRGKSDNVPSEEVVKKMKNYWRQLLNAKLITQRKFDNLTKAERGGLSELDKAGFIKRQLVETRQITKHVAQILDSRMNTKYDENDKLIREVKVITLKSKLVSDFRKDFQFYKVREINNYHHAHDAYLNAVVGTALIKKYPKLESEFVYGDYKVYDVRKMIAKSEQEIGKATAKYFFYSNIMNFFKTEITLANGEIRKRPLIETNGETGEIVWDKGRDFATVRKVLSMPQVNIVKKTEVQTGGFSKESILPKRNSDKLIARKKDWDPKKYGGFDSPTVAYSVLVVAKVEKGKSKKLKSVKELLGITIMERSSFEKNPIDFLEAKGYKEVKKDLIIKLPKYSLFELENGRKRMLASAGELQKGNELALPSKYVNFLYLASHYEKLKGSPEDNEQKQLFVEQHKHYLDEIIEQISEFSKRVILADANLDKVLSAYNKHRDKPIREQAENIIHLFTLTNLGAPAAFKYFDTTIDRKRYTSTKEVLDATLIHQSITGLYETRIDLSQLGGD

SEQ ID NO: 242 - protein, 1233 aa, Mycoplasma canis
MEKKRKVTLGFDLGIASVGWAIVDSETNQVYKLGSRLFDAPDTNLERRTQRGTRRLLRRRKYRNQKFYNLVKRTEVFGLSSREAIENRFRELSIKYPNIIELKTKALSQEVCPDEIAWILHDYLKNRGYFYDEKETKEDFDQQTVESMPSYKLNEFYKKYGYFKGALSQPTESEMKDNKDLKEAFFFDFSNKEWLKEINYFFNVQKNILSETFIEEFKKIFSFTRDISKGPGSDNMPSPYGIFGEFGDNGQGGRYEHIWDKNIGKCSIFTNEQRAPKYLPSALIFNFLNELANIRLYSTDKKNIQPLWKLSSVDKLNILLNLFNLPISEKKKKLTSTNINDIVKKESIKSIMISVEDIDMIKDEWAGKEPNVYGVGLSGLNIEESAKENKFKFQDLKILNVLINLLDNVGIKFEFKDRNDIIKNLELLDNLYLFLIYQKESNNKDSSIDLFIAKNESLNIENLKLKLKEFLLGAGNEFENHNSKTHSLSKKAIDEILPKLLDNNEGWNLEAIKNYDEEIKSQIEDNSSLMAKQDKKYLNDNFLKDAILPPNVKVTFQQAILIFNKIIQKFSKDFEIDKVVIELAREMTQDQENDALKGIAKAQKSKKSLVEERLEANNIDKSVFNDKYEKLIYKIFLWISQDFKDPYTGAQISVNEIVNNKVEIDHIIPYSLCFDDSSANKVLVHKQSNQEKSNSLPYEYIKQGHSGWNWDEFTKYVKRVFVNNVDSILSKKERLKKSENLLTASYDGYDKLGFLARNLNDTRYATILFRDQLNNYAEHHLIDNKKMFKVIAMNGAVTSFIRKNMSYDNKLRLKDRSDFSHHAYDAAIIALFSNKTKTLYNLIDPSLNGIISKRSEGYWVIEDRYTGEIKELKKEDWTSIKNNVQARKIAKEIEEYLIDLDDEVFFSRKTKRKTNRQLYNETIYGIATKTDEDGITNYYKKEKFSILDDKDIYLRLLREREKFVINQSNPEVIDQIIEIIESYGKENNIPSRDEAINIKYTKNKINYNLYLKQYMRSLTKSLDQFSEEFINQMIANKTFVLYNPTKNTTRKIKFLRLVNDVKINDIRKNQVINKFNGKNNEPKAFYENINSLGAIVFKNSANNFKTLSINTQIAIFGDKNWDIEDFKTYNMEKIEKYKEIYGIDKTYNFHSFIFPGTILLDKQNKEFYYISSIQTVRDIIEIKFLNKIEFKDENKNQDTSKTPKRLMFGIKSIMNNYEQVDISPFGINKKIFE

SEQ ID NO: 243 - protein, 1375 aa, Lactobacillus johnsonii
MTKIKDDYIVGLDIGTDSCGWVAMNSNNDILKLQGKTAIGSRLFEGGKSAAERRLFRTTHRRIKRRRWRLKLLEEFFDPYMAEVDPYFFARLKESGLSPLDKRKTVSSIVFPTSAEDKKFYDDYPTIYHLRYKLMTEDEKFDLREVYLAIHHIIKYRGNFLYNTSVKDFKASKIDVKSSIEKLNELYENLGLDLNVEFNISNTAEIEKVLKDKQIFKRDKVKKIAELFAIKTDNKEQSKRIKDISKQVANAVLGYKTRFDTIALKEISKDELSDWNFKLSDIDADSKFEALMGNLDENEQAILLTIKELFNEVTLNGIVEDGNTLSESMINKYNDHRDDLKLLKEVIENHIDRKKAKELALAYDLYVNNRHGQLLQAKKKLGKIKPRSKEDFYKVVNKNLDDSRASKEIKKKIELDSFMPKQRTNANGVIPYQLQQLELDKIIENQSKYYPFLKEINPVSSHLKEAPYKLDELIRFRVPYYVGPLISPNESTKDIQTKKNQNFAWMIRKEEGRITPWNFDQKVDRIESANKFIKRMTTKDTYLFGEDVLPANSLLYQKFTVLNELNNIRINGKRISVDLKQEIYENLFKKHTTVTVKKLENYLKENHNLVKVEIKGLADEKKFNSGLTTYNRFKNLNIFDNQIDDLKYRNDFEKIIEWSTIFEDKSIYKEKLRSIDWLNEKQINALSNIRLQGWGRLSKKLLAQLHDHNGQTIIEQLWDSQNNFMQIVTQADFKDAIAKANQNLLVATSVEDILNNAYTSPANKKAIRQVIKVVDDIVKAASGKVPKQIAIEFTRDADENPKRSQTRGSKLQKVYKDLSTELASKTIAEELNEAIKDKKLVQDKYYLYFMQLGRDAYTGEPINIDEIQKYDIDHILPQSFIKDDALDNRVLVSRAVNNGKSDNVPVKLFGNEMAANLGMTIRKMWEEWKNIGLISKTKYNNLLTDPDHINKYKSAGFIRRQLVETSQIIKLVSTILQSRYPNTEIITVKAKYNHYLREKFDLYKSREVNDYHHAIDAYLSAICGNLLYQNYPNLRPFFVYGQYKKFSSDPDKEKAIFNKTRKFSFISQLLKNKSENSKEIAKKLKRAYQFKYMLVSRETETRDQEMFKMTVYPRFSHDTVKAPRNLIPKKMGMSPDIYGGYTNNSDAYMVIVRIDKKKGTEYKILGIPTRELVNLKKAEKEDHYKSYLKEILTPRILYNKNGKRDKKITSFEIVKSKIPYKQVIQDGDKKFMLGSSTYVYNAKQLTLSTESMKAITNNFDKDSDENDALIKAYDEILDKVDKYLPLFDINKFREKLHSGREKFIKLSLEDKKDTILKVLEGLHDNAVMTKIPTIGLSTPLGFMQFPNGVILSENAKLIYQSPTGLFKKSVKISDL

SEQ ID NO: 244 - protein, 1053 aa, Staphylococcus aureus
MKRNYILGLDIGITSVGYGIIDYETRDVIDAGVRLFKEANVENNEGRRSKRGARRLKRRRRHRIQRVKKLLFDYNLLTDHSELSGINPYEARVKGLSQKLSEEEFSAALLHLAKRRGVHNVNEVEEDTGNELSTKEQISRNSKALEEKYVAELQLERLKKDGEVRGSINRFKTSDYVKEAKQLLKVQKAYHQLDQSFIDTYIDLLETRRTYYEGPGEGSPFGWKDIKEWYEMLMGHCTYFPEELRSVKYAYNADLYNALNDLNNLVITRDENEKLEYYEKFQIIENVFKQKKKPTLKQIAKEILVNEEDIKGYRVTSTGKPEFTNLKVYHDIKDITARKEIIENAELLDQIAKILTIYQSSEDIQEELTNLNSELTQEEIEQISNLKGYTGTHNLSLKAINLILDELWHTNDNQIAIFNRLKLVPKKVDLSQQKEIPTTLVDDFILSPVVKRSFIQSIKVINAIIKKYGLPNDIIIELAREKNSKDAQKMINEMQKRNRQTNERIEEIIRTTGKENAKYLIEKIKLHDMQEGKCLYSLEAIPLEDLLNNPFNYEVDHIIPRSVSFDNSFNNKVLVKQEENSKKGNRTPFQYLSSSDSKISYETFKKHILNLAKGKGRISKTKKEYLLEERDINRFSVQKDFINRNLVDTRYATRGLMNLLRSYFRVNNLDVKVKSINGGFTSFLRRKWKFKKERNKGYKHHAEDALIIANADFIFKEWKKLDKAKKVMENQMFEEKQAESMPEIETEQEYKEIFITPHQIKHIKDFKDYKYSHRVDKKPNRELINDTLYSTRKDDKGNTLIVNNLNGLYDKDNDKLKKLINKSPEKLLMYHHDPQTYQKLKLIMEQYGDEKNPLYKYYEETGNYLTKYSKKDNGPVIKKIKYYGNKLNAHLDITDDYPNSRNKVVKLSLKPYRFDVYLDNGVYKFVTVKNLDVIKKENYYEVNSKCYEEAKKLKKISNQAEFIASFYNNDLIKINGELYRVIGVNNDLLNRIEVNMIDITYREYLENMNDKRPPRIIKTIASKTQSIKKYSTDILGNLYEVKSKKHPQIIKKG

SEQ ID NO: 245 - protein, 1063 aa, Simonsiella muelleri
MEKFHYVLGLDLGIASVGWAAIEIDKETETSIGLLDCGVRTFERAEVPKTGDSLAKARREARSTRRLIRRRSHRLLRLKRLLKREIFRQPETFKDLPINAWQLRVKGLDSRLNEYEWAAVLLHLVKHRGYLSQRKSEMSETDSKSEMGRLLAGVAENHQLLQQEQYRTPAELALKKFVKHFRNKGGDYAHTFNRLDLQAELHLLFQKQRELGNPFTSPELERQVDDLLMTQRSALQGDAILKMLGHCGFEPEQFKAAKNTFSAERFIWLTKLNNLRIQDQGKERALTADERTKLLDEPYKKSKLTYAQVRKLLSLPQTAIFKGLRYDLEHDKKAENSTLMEMKSYHNIRQTLEKSGLKTEWQSIATQPEILDAIGTAFSIYKTDEDISHELKTCRLPENVLNELLKNINFDGFIQLSLTALRKILPLMEQGYRYDEACTQIYGNHHSGSLQQESKQFLPHIPIDDVRNPVVFRTLTQARKVVNAIIRRYGSPARVHIEMARELGKSKSDRDRIEKQQQKNKKERENAVAKFKEDFPDFVGEPRGKDILKMRLYEQQHGKCLYSGHDIDINRLNEKGYVEIDHALPFSRTWDDSQNNKVLVLGSENQNKRNQTPDEYLDGANNSQRWLEFQARVQTCHFSYGKKQRIQLAKLDDETEKGFLERNLNDTRYIARFMCQFVQENLYLTGKGKRLVFASNGGMTATLRNLWGLRKVREDNDRHHALDAIVVACSTASMQQKITKAFQRHESIEYVDTETGEVKFRIPQPWDFFRQEVMIRVFSDQPCEDLVEKLSARPEALHDNVTPLFVSRAPNRKMSGQGHLETIKSAKRLSEENSMVKKPLTTLKLKDIPEIVGYPSREPQLYAALKTRLETHDDDPIKAFAKPFYKPNKNGELGALVRSVRVKGVQNTGVMVHDGKGIADNATMVRVDVYTKAGKNYLVPVYVWQVAQGILPNRAVTSGKSEADWDLIDESFEFKFSLSRGDLVEMISNKGRIFGYYNGLDRANGSIGIREHDLEKSKGKDGVHRVGVKTATAFNKYHVDPLGKEIHRCSSEPRPTLKIKSKK

SEQ ID NO: 246 - protein, 1509 aa, Psychroflexus torquis
MKRILGLDLGTNSIGWSLIEHDFKNKQGQIEGLGVRIIPMSQEILGKFDAGQSISQTADRTKYRGVRRLYQRDNLRRERLHRVLKILDFLPKHYSESIDFQDKVGQFKPKQEVKLNYRKNEKNKHEFVFMNSFIEMVSEFKNAQPELFYNKGNGEETKIPYDWTLYYLRKKALTQQITKEELAWLILNFNQKRGYYQLRGEDIDEDKNKKYMQLKVNNLIDSGAKVKGKVLYNVIFDNGWKYEKQIVNKDEWEGRTKEFIITTKTLKNGNIKRTYKAVDSEIDWAAIKAKTEQDINKANKTVGEYIYESLLDNPSQKIRGKLVKTIERKFYKEEFEKLLSKQIELQPELFNESLYKACIKELYPRNENHQSNNKKQGFEYLFTEDIIFYQRPLKSQKSNISGCQFEHKIYKQKNKKTGKLELIKEPIKTISRSHPLFQEFRIWQWLQNLKIYNKEKIENGKLEDVTTQLLPNNEAYVTLFDFLNTKKELEQKQFIEYFVKKKLIDKKEKEHFRWNFVEDKKYPFSETRAQFLSRLAKVKGIKNTEDFLNKNTQVGSKENSPFIKRIEQLWHIIYSVSDLKEYEKALEKFAEKHNLEKDSFLKNFKKFPPFVSDYASYSKKAISKLLPIMRMGKYWSESAVPTQVKERSLSIMERVKVLPLKEGYSDKDLADLLSRVSDDDIPKQLIKSFISFKDKNPLKGLNTYQANYLVYGRHSETGDIQHWKTPEDIDRYLNNFKQHSLRNPIVEQVVMETLRVVRDIWEHYGNNEKDFFKEIHVELGREMKSPAGKREKLSQRNTENENTNHRIREVLKELMNDASVEGGVRDYSPSQQEILKLYEEGIYQNPNTNYLKVDEDEILKIRKKNNPTQKEIQRYKLWLEQGYISPYTGKIIPLTKLFTHEYQIEHIIPQSRYYDNSLGNKIICESEVNEDKDNKTAYEYLKVEKGSIVFGHKLLNLDEYEAHVNKYFKKNKTKLKNLLSEDIPEGFINRQLNDSRYISKLVKGLLSNIVRENGEQEATSKNLIPVTGVVTSKLKQDWGLNDKWNEIIAPRFKRLNKLTNSNDFGFWDNDINAFRIQVPDSLIKGFSKKRIDHRHHALDALVVACTSRNHTHYLSALNAENKNYSLRDKLVIKNENGDYTKTFQIPWQGFTIEAKNNLEKTVVSFKKNLRVINKTNNKFWSYKDENGNLNLGKDGKPKKKLRKQTKGYNWAIRKPLHKETVSGIYNINAPKNKIATSVRTLLTEIKNEKHLAKITDLRIRETILPNHLKHYLNNKGEANFSEAFSQGGIEDLNKKITTLNEGKKHQPIYRVKIFEVGSKFSISEDENSAKSKKYVEAAKGTNLFFAIYLDEENKKRNYETIPLNEVITHQKQVAGFPKSERLSVQPDSQKGTFLFTLSPNDLVYVPNNEELENRDLFNLGNLNVEQISRIYKFTDSSDKTCNFIPFQVSKLIFNLKKKEQKKLDVDFIIQNEFGLGSPQSKNQKSIDDVMIKEKCIKLKIDRLGNISKA

SEQ ID NO: 247 - protein, 1112 aa, Staphylococcus simulans
MLVGLKFKQSILFENMENAEDIKESATGSDAISLSDDYYENLSEFLTDEQLNFIESANTFFMGIMLDRILKGATSISAAKVRDYKIFKSQLKLIKDIVYQNKYDKYHEFFVTSKEDMRAYQENPDAKNFGKLSKFDQYLIHSKDQYAKLMKDLKGLVPKEYTEVLNLIDEQKFLVVQNTTDNASIPYQNNVFEAENILRNQQKYYPEITEEMIGKVINLISFRIPYYVGPLTNKNGQSDFAWMIRKSDEQTLPWNFDKVIDKSKSAEKFIRRMTSKCTYLLEEDVLPKHSLLYQEMEVLNELNNVQLRGENEPKHRIHRLDPKVKQFIYHNLFQKKKNVTHKDLITLLQNSEHRNTLNKTSGQKLKVFGTQNDSKFASKLSTYNDMKAILGSVENKRQMIEELVLWITIFEDKAILKQKIGEKYPNITEKQLNQIVKLNYSGWGRLSEKLLTKEVNGRSLIDLMYSTENNFMEIITDKTLGFDCFIKNSNKVKNAKISYKDVAELRTSPALKKGIWNAIKMVREISNLFGAPEKIIIEFATEDQAKGKRQKSRSELWDDLVKKNNLKRNKEFEGLFEELKAYPDLDFSNPKLWLYIHQNGKCMYTKKPIDLERLMSDTNNQLYEIDHILPRTFVKDDSINNKVLVIQSANQKKSGDKMPLEIFDNHVLVPFWKMLYENDLISSSKLSKLMKKEFNDLDKEGFIQRQLVETRQIISHVSDFLTEEYPSTTVVPMKANVVSELRRKFDIPKIRQLNDWHHAVDAYLNGFVYQAARVFYPKVNLFEFNFKWEKVREKWRQLGEFTENNKKREFFLFKRMENYVNEYGEGMISKLIFDLDNFKFNYSRKVESTESAFYKQSAFSPKNTTAQYDSDKNKTAIYKEMKNKRGIVVSYTYVKKDQELIGYGVFNETVFEYVNNADVDMNTRALKIVRKAFPKLDIKKAQYLFSINKGDALLVNGHPFLFVSAYERINGKQLEFDIAMQRKIKQALSPYNNMTEQEKVEFYNQFAEKVIEEFRNSIGLQSRDRKVNLIKNLFNNTEKSNDSMTQSILEVLKMTKVSAERSKELKIRWNGQTPNTFIDTKNNAEIQYKSITGLKTTKPKSIFKLAESKNEL

SEQ ID NO: 248 - protein, 1274 aa, Mycoplasma gallisept
MNINMNNSIKSKPEVTIGLDLGVGSVGWAIVDNETNIIHHLGSRLFSQAKTAEDRRSFRGVRRLIRRRKYKLKRFVNLIWKYNSYFGFKNKEDILNNYQEQQKLHNTVLNLKLEALNAKIDPKALSWILHDYLKNRGHFYEDNRDFNVYPTEELANYFDEFGYYKGIIDSKNDDDDKLEEGLTKYKFSNQHWLEEVKKVLSNQTGLPEKFKEEYESLFSYVRNYSEGPGSINSVSPYGIYHLDEKEGKVVQKYNNIWDKTIGKCSIFPDEYRAPKNSPIAMIFNEINELSTIRSYSIYLTGWFINQEFKKAYLNKLLDLLIKTNSEKPIDARQFKKLREETIAESIGKETLKDVESEEKLEKDDHKWKLKGLKLNTNGKIQYNDLSSLAKFVHKLKQHLKLDFLLEDQYTPLDKINFLQSLYVYLGKHLRYSNRVDSANLKEFSDSSRLFERVLQEQKDGLFKLFEQTDKDDEKILTQTHSLSTKAMLLAITRMTNLDNDEDNQKNNDKGWNFEAIKNFDQKFIDITKTNNNLSLKQDKRYLDDQFINDAILSPGVKRILREATKVFNAILKQFSEEYDVTKVVIELARELSEEKELENTKNYKKLIKKNGDKISEGLKALGIAEDKIEEILKSPTKSYKVLLWLQQDHIDPYSQKEIAFDDILTKTEKTEIDHIIPYSISFDDSSSNKLLVLAESNQAKSNQTPYEFINSGKAEITWEVYEAYCHKFKNGDSSLLDSTQRSKKFAKMMKTDTSSKYDIGFLARNLNDTRYATIVFRDALKDYANNHLVEDKPMFKVVCINGGVTSFLRKNFDPKSWYAKKDRDKNIHHAVDASIISIFSNETKTLFNQLTKFADYKLFKNTDGSWKKIDPKTGVVSEVTDENWKQIRVRNQVSEIAKVIDKYIQDSNIERKARYSRKIENKTNISLFNDTVYSAKKVGYEDQIKRKNLKTLDIHESAEENKNSKVKKQFVYRKLVNVSLLNNDKLADLFAEKEDILMYRANPWVINLAEQIFNEYTENKKIKSQNVFEKYMLDLTKEFPEKFSEAFVKSMIRNKTAIIYNVEKDVVHRIKRLKILSSELKENKWSNVIIRSKNESGTKLSYQDTINSIALMIMRSIDPTAKKQYIRVPLNTLNLHLGDQDFDLHNIDAYLKKPKFVKYLKANEIGDEYKPWRVLTSGTLLIHKKDKKLMYISSFQNLNDLIEIKNLIETEYKENVDSDPKKKKKASQILRSLSVILNDYILLDAKYNFDILGLSKNKIDEILNSKLDLDKIAK

SEQ ID NO: 249 - protein, 1122 aa, Artificial Sequence; identical to SEQ ID NO: 18
  Description of Artificial Sequence: Synthetic polypeptide

SEQ ID NO: 250 - protein, 1236 aa, Artificial Sequence; identical to SEQ ID NO: 16
  Description of Artificial Sequence: Synthetic polypeptide

SEQ ID NO: 251 - protein, 1059 aa, Artificial Sequence; identical to SEQ ID NO: 10
  Description of Artificial Sequence: Synthetic polypeptide

SEQ ID NO: 252 - protein, 1166 aa, Artificial Sequence; identical to SEQ ID NO: 34
  Description of Artificial Sequence: Synthetic polypeptide

SEQ ID NO: 253 - protein, 1149 aa, Artificial Sequence; identical to SEQ ID NO: 32
  Description of Artificial Sequence: Synthetic polypeptide

SEQ ID NO: 254 - protein, 1314 aa, Artificial Sequence; identical to SEQ ID NO: 22
  Description of Artificial Sequence: Synthetic polypeptide

SEQ ID NO: 255 - protein, 1064 aa, Artificial Sequence; identical to SEQ ID NO: 33
  Description of Artificial Sequence: Synthetic polypeptide

SEQ ID NO: 256 - protein, 1401 aa, Artificial Sequence
  Description of Artificial Sequence: Synthetic polypeptide
MDKKYSIGLDIGTNSVGWAVITDEYKVPSKKFKVLGNTDRHSIKKNLIGALLFDSGETAEATRLKRTARRRYTRRKNRICYLQEIFSNEMAKVDDSFFHRLEESFLVEEDKKHERHPIFGNIVDEVAYHEKYPTIYHLRKKLVDSTDKADLRLIYLALAHMIKFRGHFLIEGDLNPDNSDVDKLFIQLVQTYNQLFEENPINASGVDAKAILSARLSKSRRLENLIAQLPGEKKNGLFGNLIALSLGLTPNFKSNFDLAEDAKLQLSKDTYDDDLDNLLAQIGDQYADLFLAAKNLSDAILLSDILRVNTEITKAPLSASMIKRYDEHHQDLTLLKALVRQQLPEKYKEIFFDQSKNGYAGYIDGGASQEEFYKFIKPILEKMDGTEELLVKLNREDLLRKQRTFDNGSIPHQIHLGELHAILRRQEDFYPFLKDNREKIEKILTFRIPYYVGPLARGNSRFAWMTRKSEETITPWNFEEVVDKGASAQSFIERMTNFDKNLPNEKVLPKHSLLYEYFTVYNELTKVKYVTEGMRKPAFLSGEQKKAIVDLLFKTNRKVTVKQLKEDYFKKIECFDSVEISGVEDRFNASLGTYHDLLKIIKDKDFLDNEENEDILEDIVLTLTLFEDREMIEERLKTYAHLFDDKVMKQLKRRRYTGWGRLSRKLINGIRDKQSGKTILDFLKSDGFANRNFMQLIHDDSLTFKEDIQKAQVSGQGDSLHEHIANLAGSPAIKKGILQTVKVVDELVKVMGRHKPENIVIEMARENQTTQKGQKNSRERMKRIEEGIKELGSQILKEHPVENTQLQNEKLYLYYLQNGRDMYVDQELDINRLSDYDVDHIVPQSFLKDDSIDNKVLTRSDKNRGKSDNVPSEEVVKKMKNYWRQLLNAKLITQRKFDNLTKAERGGLSELDKAGFIKRQLVETRQITKHVAQILDSRMNTKYDENDKLIREVKVITLKSKLVSDFRKDFQFYKVREINNYHHAHDAYLNAVVGTALIKKYPKLESEFVYGDYKVYDVRKMIAKSEQEIGKATAKYFFYSNIMNFFKTEITLANGEIRKRPLIETNGETGEIVWDKGRDFATVRKVLSMPQVNIVKKTEVQTGGFSKESILPKRNSDKLIARKKDWDPKKYGGFDSPTVAYSVLVVAKVEKGKSKKLKSVKELLGITIMERSSFEKNPIDFLEAKGYKEVKKDLIIKLPKYSLFELENGRKRMLASAGELQKGNELALPSKYVNFLYLASHYEKLKGSPEDNEQKQLFVEQHKHYLDEIIEQISEFSKRVILADANLDKVLSAYNKHRDKPIREQAENIIHLFTLTNLGAPAAFKYFDTTIDRKRYTSTKEVLDATLIHQSITGLYETRIDLSQLGGDAYPYDVPDYASLGSGSPKKKRKVEDPKKKRKVD

SEQ ID NO: 257 - protein, 1368 aa, Artificial Sequence
  Description of Artificial Sequence: Synthetic polypeptide
MDKKYSIGLAIGTNSVGWAVITDDYKVPSKKLKGLGNTDRHGIKKNLIGALLFDSGETAEATRLKRTARRRYTRRKNRICYLQEIFSNEMAKVDDSFFHRLEESFLVEEDKKHERHPIFGNIVDEVAYHEKYPTIYHLRKKLADSTDKVDLRLIYLALAHMIKFRGHFLIEGDLNPDNSDVDKLFIQLVQTYNQLFEENPINASRVDAKAILSARLSKSRRLENLIAQLPGEKKNGLFGNLIALSLGLTPNFKSNFDLAEDAKLQLSKDTYDDDLDNLLAQIGDQYADLFLAAKNLSDATLLSDILRVNSEITKAPLSASMIKRYDEHHQDLTLLKALVRQQLPEKYKEIFFDQSKNGYAGYIDGGASQEEFYKFIKPILEKMDGTEELLAKLNREDLLRKQRTFDNGSIPYQIHLGELHAILRRQEDFYPFLKDNREKIEKILTFRIPYYVGPLARGNSRFAWMTRKSEETITPWNFEEVVDKGASAQSFIERMTNFDKNLPNEKVLPKHSLLYEYFTVYNELTKVKYVTEGMRKPAFLSGEQKKAIVDLLFKTNRKVTVKQLKEDYFKKIECFDSVEISGVEDRFNASLGTYHDLLKIIKDKDFLDNEENEDILEDIVLTLTLFEDREMIEERLKTYAHLFDDKVMKQLKRRRYTGWGRLSRKLINGIRDKQSGKTILDFLKSDGFANRNFMQLIHDDSLTFKEDIQKAQVSGQGDSLHEHIANLAGSPAIKKGILQTVKVVDELVKVMGRHKPENIVIEMARENQTTQKGQKNSRERMKRIEEGIKELGSDILKEYPVENTQLQNEKLYLYYLQNGRDMYVDQELDINRLSDYDVDHIVPQSFLKDDSIDNKVLTRSDKNRGKSDNVPSEEVVKKMKNYWRQLLNAKLITQRKFDNLTKAERGGLSELDKVGFIKRQLVETRQITKHVAQILDSRMNTKYDENDKLIREVRVITLKSKLVSDFRKDFQFYKVREINNYHHAHDAYLNAVVGTALIKKYPKLESEFVYGDYKVYDVRKMIAKSEQEIGKATAKYFFYSNIMNFFKTEITLANGEIRKRPLIETNGETGEIVWDKGRDFATVRKVLSMPQVNIVKKTEVQTGGFSKESILPKRNSDKLIARKKDWDPKKYGGFDSPTVAYSVLVVAKVEKGKSKKLKSVKELLGITIMERSSFEKDPIDFLEAKGYKEVRKDLIIKLPKYSLFELENGRKRMLASAGELQKGNELALPSKYVNFLYLASHYEKLKGSPEDNEQKQLFVEQHKHYLDEIIEQISEFSKRVILADANLDKVLSAYNKHRDKPIREQAENIIHLFTLTNLGAPAAFKYFDTTIDRKRYTSTKEVLDATLIHQSITGLYETRIDLSQLGGD

SEQ ID NO: 258 - protein, 1368 aa, Artificial Sequence
  Description of Artificial Sequence: Synthetic polypeptide
MDKKYSIGLDIGTNSVGWAVITDDYKVPSKKLKGLGNTDRHGIKKNLIGALLFDSGETAEATRLKRTARRRYTRRKNRICYLQEIFSNEMAKVDDSFFHRLEESFLVEEDKKHERHPIFGNIVDEVAYHEKYPTIYHLRKKLADSTDKVDLRLIYLALAHMIKFRGHFLIEGDLNPDNSDVDKLFIQLVQTYNQLFEENPINASRVDAKAILSARLSKSRRLENLIAQLPGEKKNGLFGNLIALSLGLTPNFKSNFDLAEDAKLQLSKDTYDDDLDNLLAQIGDQYADLFLAAKNLSDATLLSDILRVNSEITKAPLSASMIKRYDEHHQDLTLLKALVRQQLPEKYKEIFFDQSKNGYAGYIDGGASQEEFYKFIKPILEKMDGTEELLAKLNREDLLRKQRTFDNGSIPYQIHLGELHAILRRQEDFYPFLKDNREKIEKILTFRIPYYVGPLARGNSRFAWMTRKSEETITPWNFEEVVDKGASAQSFIERMTNFDKNLPNEKVLPKHSLLYEYFTVYNELTKVKYVTEGMRKPAFLSGEQKKAIVDLLFKTNRKVTVKQLKEDYFKKIECFDSVEISGVEDRFNASLGTYHDLLKIIKDKDFLDNEENEDILEDIVLTLTLFEDREMIEERLKTYAHLFDDKVMKQLKRRRYTGWGRLSRKLINGIRDKQSGKTILDFLKSDGFANRNFMQLIHDDSLTFKEDIQKAQVSGQGDSLHEHIANLAGSPAIKKGILQTVKVVDELVKVMGRHKPENIVIEMARENQTTQKGQKNSRERMKRIEEGIKELGSDILKEYPVENTQLQNEKLYLYYLQNGRDMYVDQELDINRLSDYDVDAIVPQSFLKDDSIDNKVLTRSDKNRGKSDNVPSEEVVKKMKNYWRQLLNAKLITQRKFDNLTKAERGGLSELDKVGFIKRQLVETRQITKHVAQILDSRMNTKYDENDKLIREVRVITLKSKLVSDFRKDFQFYKVREINNYHHAHDAYLNAVVGTALIKKYPKLESEFVYGDYKVYDVRKMIAKSEQEIGKATAKYFFYSNIMNFFKTEITLANGEIRKRPLIETNGETGEIVWDKGRDFATVRKVLSMPQVNIVKKTEVQTGGFSKESILPKRNSDKLIARKKDWDPKKYGGFDSPTVAYSVLVVAKVEKGKSKKLKSVKELLGITIMERSSFEKDPIDFLEAKGYKEVRKDLIIKLPKYSLFELENGRKRMLASAGELQKGNELALPSKYVNFLYLASHYEKLKGSPEDNEQKQLFVEQHKHYLDEIIEQISEFSKRVILADANLDKVLSAYNKHRDKPIREQAENIIHLFTLTNLGAPAAFKYFDTTIDRKRYTSTKEVLDATLIHQSITGLYETRIDLSQLGGD

SEQ ID NO: 259 - protein, 1368 aa, Artificial Sequence
  Description of Artificial Sequence: Synthetic polypeptide
MDKKYSIGLAIGTNSVGWAVITDDYKVPSKKLKGLGNTDRHGIKKNLIGALLFDSGETAEATRLKRTARRRYTRRKNRICYLQEIFSNEMAKVDDSFFHRLEESFLVEEDKKHERHPIFGNIVDEVAYHEKYPTIYHLRKKLADSTDKVDLRLIYLALAHMIKFRGHFLIEGDLNPDNSDVDKLFIQLVQTYNQLFEENPINASRVDAKAILSARLSKSRRLENLIAQLPGEKKNGLFGNLIALSLGLTPNFKSNFDLAEDAKLQLSKDTYDDDLDNLLAQIGDQYADLFLAAKNLSDATLLSDILRVNSEITKAPLSASMIKRYDEHHQDLTLLKALVRQQLPEKYKEIFFDQSKNGYAGYIDGGASQEEFYKFIKPILEKMDGTEELLAKLNREDLLRKQRTFDNGSIPYQIHLGELHAILRRQEDFYPFLKDNREKIEKILTFRIPYYVGPLARGNSRFAWMTRKSEETITPWNFEEVVDKGASAQSFIERMTNFDKNLPNEKVLPKHSLLYEYFTVYNELTKVKYVTEGMRKPAFLSGEQKKAIVDLLFKTNRKVTVKQLKEDYFKKIECFDSVEISGVEDRFNASLGTYHDLLKIIKDKDFLDNEENEDILEDIVLTLTLFEDREMIEERLKTYAHLFDDKVMKQLKRRRYTGWGRLSRKLINGIRDKQSGKTILDFLKSDGFANRNFMQLIHDDSLTFKEDIQKAQVSGQGDSLHEHIANLAGSPAIKKGILQTVKVVDELVKVMGRHKPENIVIEMARENQTTQKGQKNSRERMKRIEEGIKELGSDILKEYPVENTQLQNEKLYLYYLQNGRDMYVDQELDINRLSDYDVDAIVPQSFLKDDSIDNKVLTRSDKNRGKSDNVPSEEVVKKMKNYWRQLLNAKLITQRKFDNLTKAERGGLSELDKVGFIKRQLVETRQITKHVAQILDSRMNTKYDENDKLIREVRVITLKSKLVSDFRKDFQFYKVREINNYHHAHDAYLNAVVGTALIKKYPKLESEFVYGDYKVYDVRKMIAKSEQEIGKATAKYFFYSNIMNFFKTEITLANGEIRKRPLIETNGETGEIVWDKGRDFATVRKVLSMPQVNIVKKTEVQTGGFSKESILPKRNSDKLIARKKDWDPKKYGGFDSPTVAYSVLVVAKVEKGKSKKLKSVKELLGITIMERSSFEKDPIDFLEAKGYKEVRKDLIIKLPKYSLFELENGRKRMLASAGELQKGNELALPSKYVNFLYLASHYEKLKGSPEDNEQKQLFVEQHKHYLDEIIEQISEFSKRVILADANLDKVLSAYNKHRDKPIREQAENIIHLFTLTNLGAPAAFKYFDTTIDRKRYTSTKEVLDATLIHQSITGLYETRIDLSQLGGD

SEQ ID NO: 260 - protein, 15 aa, Artificial Sequence
  Description of Artificial Sequence: Synthetic peptide
IGLDIGTNSVGWAVI

SEQ ID NO: 261 - protein, 8 aa, Artificial Sequence
  Description of Artificial Sequence: Synthetic peptide
IVIEMARE

SEQ ID NO: 262 - protein, 27 aa, Artificial Sequence
  Description of Artificial Sequence: Synthetic peptide
DVDHIVPQSFLKDDSIDNKVLTRSDKN

SEQ ID NO: 263 - protein, 8 aa, Artificial Sequence
  Description of Artificial Sequence: Synthetic peptide
HHAHDAYL

SEQ ID NO: 264 - protein, 11 aa, Artificial Sequence
  Description of Artificial Sequence: Synthetic peptide
YGRKKRRQRRR

SEQ ID NO: 265 - protein, 12 aa, Artificial Sequence
  Description of Artificial Sequence: Synthetic peptide
RRQRRTSKLMKR

SEQ ID NO: 266 - protein, 27 aa, Artificial Sequence
  Description of Artificial Sequence: Synthetic peptide
GWTLNSAGYLLGKINLKALAALAKKIL

SEQ ID NO: 267 - protein, 33 aa, Artificial Sequence
  Description of Artificial Sequence: Synthetic polypeptide
KALAWEAKLAKALAKALAKHLAKALAKALKCEA

SEQ ID NO: 268 - protein, 16 aa, Artificial Sequence
  Description of Artificial Sequence: Synthetic peptide
RQIKIWFQNRRMKWKK

SEQ ID NO: 269 - protein, 9 aa, Artificial Sequence
  Description of Artificial Sequence: Synthetic peptide
RKKRRQRRR

SEQ ID NO: 270 - protein, 8 aa, Artificial Sequence
  Description of Artificial Sequence: Synthetic peptide
RKKRRQRR

SEQ ID NO: 271 - protein, 11 aa, Artificial Sequence
  Description of Artificial Sequence: Synthetic peptide
YARAAARQARA

SEQ ID NO: 272 - protein, 11 aa, Artificial Sequence
  Description of Artificial Sequence: Synthetic peptide
THRLPRRRRRR

SEQ ID NO: 273 - protein, 11 aa, Artificial Sequence
  Description of Artificial Sequence: Synthetic peptide
GGRRARRRRRR

SEQ ID NO: 274 - protein, 13 aa, Artificial Sequence
  Description of Artificial Sequence: Synthetic peptide
DAYPYDVPDYASL

SEQ ID NO: 275 - protein, 17 aa, Artificial Sequence
  Description of Artificial Sequence: Synthetic peptide
PKKKRKVEDPKKKRKVD

SEQ ID NO: 276 - DNA, 4206 bp, Artificial Sequence
  Description of Artificial Sequence: Synthetic polynucleotide
atggacaagaagtacagcatcggcctggacatcggcaccaactctgtgggctgggccgtgatcaccgacgagtacaaggtgcccagcaagaaattcaaggtgctgggcaacaccgaccggcacagcatcaagaagaacctgatcggcgccctgctgttcgacagcggagaaacagccgaggccacccggctgaagagaaccgccagaagaagatacaccagacggaagaaccggatctgctatctgcaagagatcttcagcaacgagatggccaaggtggacgacagcttcttccacagactggaagagtccttcctggtggaagaggataagaagcacgagcggcaccccatcttcggcaacatcgtggacgaggtggcctaccacgagaagtaccccaccatctaccacctgagaaagaaactggtggacagcaccgacaaggccgacctgcggctgatctatctggccctggcccacatgatcaagttccggggccacttcctgatcgagggcgacctgaaccccgacaacagcgacgtggacaagctgttcatccagctggtgcagacctacaaccagctgttcgaggaaaaccccatcaacgccagcggcgtggacgccaaggccatcctgtctgccagactgagcaagagcagacggctggaaaatctgatcgcccagctgcccggcgagaagaagaatggcctgttcggcaacctgattgccctgagcctgggcctgacccccaacttcaagagcaacttcgacctggccgaggatgccaaactgcagctgagcaaggacacctacgacgacgacctggacaacctgctggcccagatcggcgaccagtacgccgacctgtttctggccgccaagaacctgtccgacgccatcctgctgagcgacatcctgagagtgaacaccgagatcaccaaggcccccctgagcgcctctatgatcaagagatacgacgagcaccaccaggacctgaccctgctgaaagctctcgtgcggcagcagctgcctgagaagtacaaagagattttcttcgaccagagcaagaacggctacgccggctacatcgatggcggagccagccaggaagagttctacaagttcatcaagcccatcctggaaaagatggacggcaccgaggaactgctcgtgaagctgaacagagaggacctgctgcggaagcagcggaccttcgacaacggcagcatcccccaccagatccacctgggagagctgcacgccattctgcggcggcaggaagatttttacccattcctgaaggacaaccgggaaaagatcgagaagatcctgaccttccgcatcccctactacgtgggccctctggccaggggaaacagcagattcgcctggatgaccagaaagagcgaggaaaccatcaccccctggaacttcgaggaagtggtggacaagggcgccagcgcccagagcttcatcgagcggatgaccaacttcgataagaacctgcccaacgagaaggtgctgcccaagcacagcctgctgtacgagtacttcaccgtgtacaacgagctgaccaaagtgaaatacgtgaccgagggaatgagaaagcccgccttcctgagcggcgagcagaaaaaagccatcgtggacctgctgttcaagaccaaccggaaagtgaccgtgaagcagctgaaagaggactacttcaagaaaatcgagtgcttcgactccgtggaaatctccggcgtggaagatcggttcaacgcctccctgggcacataccacgatctgctgaaaattatcaaggacaaggacttcctggacaatgaggaaaacgaggacattctggaagatatcgtgctgaccctgacactgtttgaggacagagagatgatcgaggaacggctgaaaacctatgcccacctgttcgacgacaaagtgatgaagcagctgaagcggcggagatacaccggctggggcaggctgagccggaagctgatcaacggcatccgggacaagcagtccggcaagacaatcctggatttcctgaagtccgacggcttcgccaacagaaacttcatgcagctgatccacgacgacagcctgacctttaaagaggacatccagaaagcccaggtgtccggccagggcgatagcctgcacgagcacattgccaatctggccggcagccccgccattaagaagggcatcctgcagacagtgaaggtggtggacgagctcgtgaaagtgatgggccggcacaagcccgagaacatcgtgatcgaaatggccagagagaaccagaccacccagaagggacagaagaacagccgcgagagaatgaagcggatcgaagagggcatcaaagagctgggcagccagatcctgaaagaacaccccgtggaaaacacccagctgcagaacgagaagctgtacctgtactacctgcagaatgggcgggatatgtacgtggaccaggaactggacatcaaccggctgtccgactacgatgtggaccatatcgtgcctcagagctttctgaaggacgactccatcgataacaaagtgctgactcggagcgacaagaaccggggcaagagcgacaacgtgccctccgaagaggtcgtgaagaagatgaagaactactggcgccagctgctgaatgccaagctgattacccagaggaagttcgacaatctgaccaaggccgagagaggcggcctgagcgaactggataaggccggcttcatcaagagacagctggtggaaacccggcagatcacaaagcacgtggcacagatcctggactcccggatgaacactaagtacgacgagaacgacaaactgatccgggaagtgaaagtgatcaccctgaagtccaagctggtgtccgatttccggaaggatttccagttttacaaagtgcgcgagatcaacaactaccaccacgcccacgacgcctacctgaacgccgtcgtgggaaccgccctgatcaaaaagtaccctaagctggaaagcgagttcgtgtacggcgactacaaggtgtacgacgtgcggaagatgatcgccaagagcgagcaggaaatcggcaaggctaccgccaagtacttcttctacagcaacatcatgaactttttcaagaccgagattaccctggccaacggcgagatccggaagcggcctctgatcgagacaaacggcgaaacaggcgagatcgtgtgggataagggccgggactttgccaccgtgcggaaagtgctgtctatgccccaagtgaatatcgtgaaaaagaccgaggtgcagacaggcggcttcagcaaagagtctatcctgcccaagaggaacagcgacaagctgatcgccagaaagaaggactgggaccctaagaagtacggcggcttcgacagccccaccgtggcctattctgtgctggtggtggccaaagtggaaaagggcaagtccaagaaactgaagagtgtgaaagagctgctggggatcaccatcatggaaagaagcagcttcgagaagaatcccatcgactttctggaagccaagggctacaaagaagtgaaaaaggacctgatcatcaagctgcctaagtactccctgttcgagctggaaaacggccggaagagaatgctggcctctgccggcgaactgcagaagggaaacgaactggccctgccctccaaatatgtgaacttcctgtacctggccagccactatgagaagctgaagggctcccccgaggataatgagcagaaacagctgtttgtggaacagcacaaacactacctggacgagatcatcgagcagatcagcgagttctccaagagagtgatcctggccgacgctaatctggacaaggtgctgagcgcctacaacaagcacagagacaagcctatcagagagcaggccgagaatatcatccacctgtttaccctgaccaatctgggagcccctgccgccttcaagtactttgacaccaccatcgaccggaagaggtacaccagcaccaaagaggtgctggacgccaccctgatccaccagagcatcaccggcctgtacgagacacggatcgacctgtctcagctgggaggcgacgcctatccctatgacgtgcccgattatgccagcctgggcagcggctcccccaagaaaaaacgcaaggtggaagatcctaagaaaaagcggaaagtggactga

SEQ ID NO: 277 - protein, 1401 aa, Artificial Sequence; identical to SEQ ID NO: 256
  Description of Artificial Sequence: Synthetic polypeptide

SEQ ID NO: 278 - DNA, 50 bp, Artificial Sequence
  Description of Artificial Sequence: Synthetic oligonucleotide
ttatatgaacataactcaatttgtaaaaaagggtattggggaattcatta

SEQ ID NO: 279 - DNA, 50 bp, Artificial Sequence
  Description of Artificial Sequence: Synthetic oligonucleotide
taatgaattccccaatacccttttttacaaattgagttatgttcatataa

SEQ ID NO: 280 - RNA, 42 nt, Artificial Sequence
  Description of Artificial Sequence: Synthetic oligonucleotide
auaacucaauuuguaaaaaaguuuuagagcuaugcuguuuug

SEQ ID NO: 281 - DNA, 27 bp, Artificial Sequence
  Description of Artificial Sequence: Synthetic oligonucleotide
aacataactcaatttgtaaaaaagggt

SEQ ID NO: 282 - DNA, 27 bp, Artificial Sequence
  Description of Artificial Sequence: Synthetic oligonucleotide
acccttttttacaaattgagttatgtt

SEQ ID NO: 283 - RNA, 25 nt, Artificial Sequence
  Description of Artificial Sequence: Synthetic oligonucleotide
auaacucaauuuguaaaaaaguuuu

SEQ ID NO: 284 - DNA, 23 bp, Artificial Sequence
  Description of Artificial Sequence: Synthetic oligonucleotide
agcataactcaatttgtaaaaaa

SEQ ID NO: 285 - DNA, 23 bp, Artificial Sequence
  Description of Artificial Sequence: Synthetic oligonucleotide
aacataactcaatctgtaaaaaa

SEQ ID NO: 286 - DNA, 23 bp, Artificial Sequence
  Description of Artificial Sequence: Synthetic oligonucleotide
aacataactcaatttgaaaaaaa

SEQ ID NO: 287 - DNA, 23 bp, Artificial Sequence
  Description of Artificial Sequence: Synthetic oligonucleotide
aacataactcaatttgttaaaaa

SEQ ID NO: 288 - DNA, 23 bp, Artificial Sequence
  Description of Artificial Sequence: Synthetic oligonucleotide
aacataactcaatttgtataaaa

SEQ ID NO: 289 - DNA, 23 bp, Artificial Sequence
  Description of Artificial Sequence: Synthetic oligonucleotide
aacataactcaatttgtaataaa

SEQ ID NO: 290 - DNA, 23 bp, Artificial Sequence
  Description of Artificial Sequence: Synthetic oligonucleotide
aacataactcaatttgtaaataa

SEQ ID NO: 291 - DNA, 27 bp, Artificial Sequence
  Description of Artificial Sequence: Synthetic oligonucleotide
aacataactcaatttgtaaaaaatggc

SEQ ID NO: 292 - DNA, 27 bp, Artificial Sequence
  Description of Artificial Sequence: Synthetic oligonucleotide
gccattttttacaaattgagttatgtt

SEQ ID NO: 293 - DNA, 20 bp, Artificial Sequence
  Description of Artificial Sequence: Synthetic oligonucleotide
tattgagttaaagtaaaaaa

SEQ ID NO: 294 - DNA, 20 bp, Artificial Sequence
  Description of Artificial Sequence: Synthetic oligonucleotide
tattgagttattgtaaaaaa

SEQ ID NO: 295 - DNA, 20 bp, Artificial Sequence
  Description of Artificial Sequence: Synthetic oligonucleotide
tattgagtatttgtaaaaaa

SEQ ID NO: 296 - DNA, 20 bp, Artificial Sequence
  Description of Artificial Sequence: Synthetic oligonucleotide
tattgacaatttgtaaaaaa

SEQ ID NO: 297 - DNA, 20 bp, Artificial Sequence
  Description of Artificial Sequence: Synthetic oligonucleotide
tattctcaatttgtaaaaaa

SEQ ID NO: 298 - DNA, 20 bp, Artificial Sequence
  Description of Artificial Sequence: Synthetic oligonucleotide
taaactcaatttgtaaaaaa

SEQ ID NO: 299 - RNA, 62 nt, Artificial Sequence
  Description of Artificial Sequence: Synthetic oligonucleotide
aaaaauuaggugcgcuuggcguuuuagagcuagaaauagcaaguuaaaauaaggcuaguccg

SEQ ID NO: 300 - RNA, 54 nt, Artificial Sequence
  Description of Artificial Sequence: Synthetic oligonucleotide
aaaaauuaggugcgcuuggcguuuuagagcuagaaauagcaaguuaaaauaagg

SEQ ID NO: 301 - DNA, 50 bp, Artificial Sequence
  Description of Artificial Sequence: Synthetic oligonucleotide
tgcgctggttgatttcttcttgcgctttttgggtattggggaattcatta

SEQ ID NO: 302 - DNA, 50 bp, Artificial Sequence
  Description of Artificial Sequence: Synthetic oligonucleotide
taatgaattccccaatacccaaaaagcgcaagaagaaatcaaccagcgca

SEQ ID NO: 303 - RNA, 42 nt, Artificial Sequence
  Description of Artificial Sequence: Synthetic oligonucleotide
gauuucuucuugcgcuuuuuguuuuagagcuaugcuguuuug

SEQ ID NO: 304 - DNA, 50 bp, Artificial Sequence
  Description of Artificial Sequence: Synthetic oligonucleotide
ggttatattaagtgccgaggaaaaattaggtgcgcttggctggcgcatta

SEQ ID NO: 305 - DNA, 50 bp, Artificial Sequence
  Description of Artificial Sequence: Synthetic oligonucleotide
taatgcgccagccaagcgcacctaatttttcctcggcacttaatataacc

SEQ ID NO: 306 - RNA, 42 nt, Artificial Sequence
  Description of Artificial Sequence: Synthetic oligonucleotide
aaaaauuaggugcgcuuggcguuuuagagcuaugcuguuuug

SEQ ID NO: 307 - DNA, 50 bp, Artificial Sequence
  Description of Artificial Sequence: Synthetic oligonucleotide
tacgctggttgatttcttcttgcgcttttttggctttttcgagttcggct

SEQ ID NO: 308 - DNA, 50 bp, Artificial Sequence
  Description of Artificial Sequence: Synthetic oligonucleotide
agccgaactcgaaaaagccaaaaaagcgcaagaagaaatcaaccagcgta

SEQ ID NO: 309 - RNA, 42 nt, Artificial Sequence; identical to SEQ ID NO: 303
  Description of Artificial Sequence: Synthetic oligonucleotide

SEQ ID NO: 310 - DNA, 14 bp, Artificial Sequence
  Description of Artificial Sequence: Synthetic oligonucleotide
taatgcgccagcca

SEQ ID NO: 311 - RNA, 42 nt, Artificial Sequence; identical to SEQ ID NO: 306
  Description of Artificial Sequence: Synthetic oligonucleotide

SEQ ID NO: 312 - DNA, 25 bp, Artificial Sequence
  Description of Artificial Sequence: Synthetic oligonucleotide
ataactcaatttgtaaaaaagggta

SEQ ID NO: 313 - DNA, 25 bp, Artificial Sequence
  Description of Artificial Sequence: Synthetic oligonucleotide
ataactcaatttgtaaaaaagcgta

SEQ ID NO: 314 - DNA, 25 bp, Artificial Sequence
  Description of Artificial Sequence: Synthetic oligonucleotide
ataactcaatttgtaaaaaagccta

SEQ ID NO: 315 - DNA, 26 bp, Artificial Sequence
  Description of Artificial Sequence: Synthetic oligonucleotide
aaaaattaggtgcgcttggctggcgc

SEQ ID NO: 316 - DNA, 26 bp, Artificial Sequence
  Description of Artificial Sequence: Synthetic oligonucleotide
aaaaattaggtgcgcttggctcgcgc

SEQ ID NO: 317 - DNA, 26 bp, Artificial Sequence
  Description of Artificial Sequence: Synthetic oligonucleotide
aaaaattaggtgcgcttggctgccgc

SEQ ID NO: 318 - DNA, 26 bp, Artificial Sequence
  Description of Artificial Sequence: Synthetic oligonucleotide
aaaaattaggtgcgcttggctggccc

SEQ ID NO: 319 - DNA, 26 bp, Artificial Sequence
  Description of Artificial Sequence: Synthetic oligonucleotide
aaaaattaggtgcgcttggctccccc

SEQ ID NO: 320 - DNA, 21 bp, Artificial Sequence
  Description of Artificial Sequence: Synthetic oligonucleotide
aaaaattaggtgcgcttggct

SEQ ID NO: 321 - RNA, 62 nt, Artificial Sequence
  Description of Artificial Sequence: Synthetic oligonucleotide
gauuucuucuugcgcuuuuuguuuuagagcuagaaauagcaaguuaaaauaaggcuaguccg

SEQ ID NO: 322 - RNA, 54 nt, Artificial Sequence
  Description of Artificial Sequence: Synthetic oligonucleotide
gauuucuucuugcgcuuuuuguuuuagagcuagaaauagcaaguuaaaauaagg

SEQ ID NO: 323 - RNA, 62 nt, Artificial Sequence
  Description of Artificial Sequence: Synthetic oligonucleotide
auaacucaauuuguaaaaaaguuuuagagcuagaaauagcaaguuaaaauaaggcuaguccg

SEQ ID NO: 324 - RNA, 54 nt, Artificial Sequence
  Description of Artificial Sequence: Synthetic oligonucleotide
auaacucaauuuguaaaaaaguuuuagagcuagaaauagcaaguuaaaauaagg

SEQ ID NO: 325 - DNA, 120 bp, Artificial Sequence
  Description of Artificial Sequence: Synthetic polynucleotide
gtcccaattcttgttgaattagatggtgatgttaatgggcacaaattttctgtcagtggagagggtgaaggtgatgcaacatacggaaaacttacccttaaatttatttgcactactgga

SEQ ID NO: 326 - DNA, 120 bp, Artificial Sequence
  Description of Artificial Sequence: Synthetic polynucleotide
tccagtagtgcaaataaatttaagggtaagttttccgtatgttgcatcaccttcaccctctccactgacagaaaatttgtgcccattaacatcaccatctaattcaacaagaattgggac

SEQ ID NO: 327 - DNA, 26 bp, Artificial Sequence
  Description of Artificial Sequence: Synthetic oligonucleotide
ccaattcttgttgaattagatggtga

SEQ ID NO: 328 - DNA, 26 bp, Artificial Sequence
  Description of Artificial Sequence: Synthetic oligonucleotide
aattagatggtgatgttaatgggcac

SEQ ID NO: 329 - DNA, 26 bp, Artificial Sequence
  Description of Artificial Sequence: Synthetic oligonucleotide
aaattttctgtcagtggagagggtga

SEQ ID NO: 330 - DNA, 26 bp, Artificial Sequence
  Description of Artificial Sequence: Synthetic oligonucleotide
catctaattcaacaagaattgggaca

SEQ ID NO: 331 - DNA, 26 bp, Artificial Sequence
  Description of Artificial Sequence: Synthetic oligonucleotide
cagtagtgcaaataaatttaagggta

SEQ ID NO: 332 - RNA, 68 nt, Artificial Sequence
  Description of Artificial Sequence: Synthetic oligonucleotide
ccaauucuuguugaauuagauggugaguuuuagagcuagaaauagcaaguuaaaauaaggcuaguccg

SEQ ID NO: 333 - RNA, 68 nt, Artificial Sequence
  Description of Artificial Sequence: Synthetic oligonucleotide
aauuagauggugauguuaaugggcacguuuuagagcuagaaauagcaaguuaaaauaaggcuaguccg

SEQ ID NO: 334 - RNA, 68 nt, Artificial Sequence
  Description of Artificial Sequence: Synthetic oligonucleotide
aaauuuucugucaguggagagggugaguuuuagagcuagaaauagcaaguuaaaauaaggcuaguccg

SEQ ID NO: 335 - RNA, 68 nt, Artificial Sequence
  Description of Artificial Sequence: Synthetic oligonucleotide
caucuaauucaacaagaauugggacaguuuuagagcuagaaauagcaaguuaaaauaaggcuaguccg

SEQ ID NO: 336 - RNA, 68 nt, Artificial Sequence
  Description of Artificial Sequence: Synthetic oligonucleotide
caguagugcaaauaaauuuaaggguaguuuuagagcuagaaauagcaaguuaaaauaaggcuaguccg

SEQ ID NO: 337 - DNA, 50 bp, Artificial Sequence
  Description of Artificial Sequence: Synthetic oligonucleotide
ggttatattaagtgccgaggaaaaattaggtgcgcttggctgccgcatta

SEQ ID NO: 338 - DNA, 50 bp, Artificial Sequence
  Description of Artificial Sequence: Synthetic oligonucleotide
taatgcggcagccaagcgcacctaatttttcctcggcacttaatataacc

SEQ ID NO: 339 - RNA, 42 nt, Artificial Sequence; identical to SEQ ID NO: 306
  Description of Artificial Sequence: Synthetic oligonucleotide

SEQ ID NO: 340 - DNA, 59 bp, Artificial Sequence
  Description of Artificial Sequence: Synthetic oligonucleotide
gaaattaatacgactcactatagaaaacagcatagcaagttaaaataaagttaaaataa

SEQ ID NO: 341 - DNA, 25 bp, Artificial Sequence
  Description of Artificial Sequence: Synthetic oligonucleotide
aaaaaaagcaccgactcggtgccac

SEQ ID NO: 342 - DNA, 66 bp, Artificial Sequence
  Description of Artificial Sequence: Synthetic oligonucleotide
gaaattaatacgactcactatagggatttcttcttgcgctttttgttttagagctatgctgttttg

SEQ ID NO: 343 - DNA, 66 bp, Artificial Sequence
  Description of Artificial Sequence: Synthetic oligonucleotide
caaaacagcatagctctaaaacaaaaagcgcaagaagaaatccctatagtgagtcgtattaatttc

SEQ ID NO: 344 - DNA, 66 bp, Artificial Sequence
  Description of Artificial Sequence: Synthetic oligonucleotide
gaaattaatacgactcactataggataactcaatttgtaaaaaagttttagagctatgctgttttg

SEQ ID NO: 345 - DNA, 66 bp, Artificial Sequence
  Description of Artificial Sequence: Synthetic oligonucleotide
caaaacagcatagctctaaaacttttttacaaattgagttatcctatagtgagtcgtattaatttc

SEQ ID NO: 346 - DNA, 51 bp, Artificial Sequence
  Description of Artificial Sequence: Synthetic oligonucleotide
gaaattaatacgactcactatagatgatgagaaccgttgctacaataaggc

SEQ ID NO: 347 - DNA, 24 bp, Artificial Sequence
  Description of Artificial Sequence: Synthetic oligonucleotide
aaataaacgatgccccttaaagca

SEQ ID NO: 348 - DNA, 68 bp, Artificial Sequence
  Description of Artificial Sequence: Synthetic oligonucleotide
gaaattaatacgactcactatagatgataactcaatttgtaaaaaagttgtagctccctttctcattt

SEQ ID NO: 349 - DNA, 68 bp, Artificial Sequence
  Description of Artificial Sequence: Synthetic oligonucleotide
aaatgagaaagggagctacaacttttttacaaattgagttatcatctatagtgagtcgtattaatttc

SEQ ID NO: 350 - DNA, 51 bp, Artificial Sequence
  Description of Artificial Sequence: Synthetic oligonucleotide
gaaattaatacgactcactatagatgaaataacatagcaagttaaaataag

SEQ ID NO: 351 - DNA, 31 bp, Artificial Sequence
  Description of Artificial Sequence: Synthetic oligonucleotide
aaaaaaagcgccgaaacagcgctacttaatt

SEQ ID NO: 352 - DNA, 68 bp, Artificial Sequence
  Description of Artificial Sequence: Synthetic oligonucleotide
gaaattaatacgactcactatagatgataactcaatttgtaaaaaagttttagagctatgttattttg

SEQ ID NO: 353 - DNA, 68 bp, Artificial Sequence
  Description of Artificial Sequence: Synthetic oligonucleotide
caaaataacatagctctaaaacttttttacaaattgagttatcatctatagtgagtcgtattaatttc

SEQ ID NO: 354 - DNA, 35 bp, Artificial Sequence
  Description of Artificial Sequence: Synthetic oligonucleotide
atgcacctgcaggatgctgttaaataattgtatac

SEQ ID NO: 355 - DNA, 36 bp, Artificial Sequence
  Description of Artificial Sequence: Synthetic oligonucleotide
atgcacggatccagctgctctaagtctactaaaacc

SEQ ID NO: 356 - DNA, 39 bp, Artificial Sequence
  Description of Artificial Sequence: Synthetic oligonucleotide
atgcagggccggccgtgacagagagaaacttgattcaac

SEQ ID NO: 357 - DNA, 39 bp, Artificial Sequence
  Description of Artificial Sequence: Synthetic oligonucleotide
atgcagggccggcccttcgtttaagtaaacatcaaagtg

SEQ ID NO: 358 - DNA, 59 bp, Artificial Sequence
  Description of Artificial Sequence: Synthetic oligonucleotide
atgagcgataatagaataaagttatatgagcataactcaatttgtaaaaaagggtattg

SEQ ID NO: 359 - DNA, 59 bp, Artificial Sequence
  Description of Artificial Sequence: Synthetic oligonucleotide
caatacccttttttacaaattgagttatgctcatataactttattctattatcgctcat

SEQ ID NO: 360 - DNA, 57 bp, Artificial Sequence
  Description of Artificial Sequence: Synthetic oligonucleotide
gcgataatagaataaagttatatgaacataactcaatctgtaaaaaagggtattggg

SEQ ID NO: 361 - DNA, 57 bp, Artificial Sequence
  Description of Artificial Sequence: Synthetic oligonucleotide
cccaatacccttttttacagattgagttatgttcatataactttattctattatcgc

SEQ ID NO: 362 - DNA, 40 bp, Artificial Sequence
  Description of Artificial Sequence: Synthetic oligonucleotide
gaacataactcaatttgaaaaaaagggtattggggaattc

SEQ ID NO: 363 - DNA, 40 bp, Artificial Sequence
  Description of Artificial Sequence: Synthetic oligonucleotide
gaattccccaataccctttttttcaaattgagttatgttc

SEQ ID NO: 364 - DNA, 40 bp, Artificial Sequence
  Description of Artificial Sequence: Synthetic oligonucleotide
gaacataactcaatttgttaaaaagggtattggggaattc

SEQ ID NO: 365 - DNA, 40 bp, Artificial Sequence
  Description of Artificial Sequence: Synthetic oligonucleotide
gaattccccaataccctttttaacaaattgagttatgttc

SEQ ID NO: 366 - DNA, 43 bp, Artificial Sequence
  Description of Artificial Sequence: Synthetic oligonucleotide
gaacataactcaatttgtataaaagggtattggggaattcatt

SEQ ID NO: 367 - DNA, 43 bp, Artificial Sequence
  Description of Artificial Sequence: Synthetic oligonucleotide
aatgaattccccaatacccttttatacaaattgagttatgttc

SEQ ID NO: 368 - DNA, 43 bp, Artificial Sequence
  Description of Artificial Sequence: Synthetic oligonucleotide
gaacataactcaatttgtaataaagggtattggggaattcatt

SEQ ID NO: 369 - DNA, 43 bp, Artificial Sequence
  Description of Artificial Sequence: Synthetic oligonucleotide
aatgaattccccaataccctttattacaaattgagttatgttc

SEQ ID NO: 370 - DNA, 40 bp, Artificial Sequence
  Description of Artificial Sequence: Synthetic oligonucleotide
cataactcaatttgtaaataagggtattggggaattcatt

SEQ ID NO: 371 - DNA, 40 bp, Artificial Sequence
  Description of Artificial Sequence: Synthetic oligonucleotide
aatgaattccccaatacccttatttacaaattgagttatg

SEQ ID NO: 372 - DNA, 46 bp, Artificial Sequence
  Description of Artificial Sequence: Synthetic oligonucleotide
cataactcaatttgtaaaaaagcgtattggggaattcattataaag

SEQ ID NO: 373 - DNA, 46 bp, Artificial Sequence
  Description of Artificial Sequence: Synthetic oligonucleotide
ctttataatgaattccccaatacgcttttttacaaattgagttatg

SEQ ID NO: 374 - DNA, 44 bp, Artificial Sequence
  Description of Artificial Sequence: Synthetic oligonucleotide
cataactcaatttgtaaaaaagcctattggggaattcattataa

SEQ ID NO: 375 - DNA, 44 bp, Artificial Sequence
  Description of Artificial Sequence: Synthetic oligonucleotide
ttataatgaattccccaataggcttttttacaaattgagttatg

SEQ ID NO: 376 - DNA, 38 bp, Artificial Sequence
  Description of Artificial Sequence: Synthetic oligonucleotide
atgcagggccggccagtatcagcgtacttggatttggg

SEQ ID NO: 377 - DNA, 37 bp, Artificial Sequence
  Description of Artificial Sequence: Synthetic oligonucleotide
atgcagggccggccttgtctcactcactctatttttg

SEQ ID NO: 378 - DNA, 30 bp, Artificial Sequence
  Description of Artificial Sequence: Synthetic oligonucleotide
gatttcttgcgcttttttggctttttcgag

SEQ ID NO: 379 - DNA, 30 bp, Artificial Sequence
  Description of Artificial Sequence: Synthetic oligonucleotide
gggatggcaatccatgggtcaaggtactag

SEQ ID NO: 380 - DNA, 20 bp, Artificial Sequence
  Description of Artificial Sequence: Synthetic oligonucleotide
ggaacgaaaactcacgttaa

SEQ ID NO: 381 - DNA, 25 bp, Artificial Sequence
  Description of Artificial Sequence: Synthetic oligonucleotide
tgagagtgtcttttcagatgctgtg

SEQ ID NO: 382 - DNA, 21 bp, Artificial Sequence
  Description of Artificial Sequence: Synthetic oligonucleotide
agcggtatctgttccccaaaa

SEQ ID NO: 383 - DNA, 21 bp, Artificial Sequence
  Description of Artificial Sequence: Synthetic oligonucleotide
gttaaaaaccacgtaaccaca

SEQ ID NO: 384 - RNA, 42 nt, Artificial Sequence; identical to SEQ ID NO: 303
  Description of Artificial Sequence: Synthetic oligonucleotide

SEQ ID NO: 385 - RNA, 42 nt, Artificial Sequence; identical to SEQ ID NO: 280
  Description of Artificial Sequence: Synthetic oligonucleotide

SEQ ID NO: 386 - RNA, 42 nt, Artificial Sequence; identical to SEQ ID NO: 306
  Description of Artificial Sequence: Synthetic oligonucleotide

SEQ ID NO: 387 - RNA, 36 nt, Artificial Sequence
  Description of Artificial Sequence: Synthetic oligonucleotide
auaacucaauuuguaaaaaaguuuuagagcuaugcu

SEQ ID NO: 388 - RNA, 32 nt, Artificial Sequence
  Description of Artificial Sequence: Synthetic oligonucleotide
auaacucaauuuguaaaaaaguuuuagagcua

SEQ ID NO: 389 - RNA, 22 nt, Artificial Sequence
  Description of Artificial Sequence: Synthetic oligonucleotide
uuguaaaaaaguuuuagagcua

SEQ ID NO: 390 - RNA, 89 nt, Artificial Sequence
  Description of Artificial Sequence: Synthetic oligonucleotide
guuggaaccauucaaaacagcauagcaaguuaaaauaaggcuaguccguuaucaacuugaaaaaguggcaccgagucggugcuuuuuuu

SEQ ID NO: 391 - RNA, 74 nt, Artificial Sequence
  Description of Artificial Sequence: Synthetic oligonucleotide
aacagcauagcaaguuaaaauaaggcuaguccguuaucaacuugaaaaaguggcaccgagucggugcuuuuuuu

SEQ ID NO: 392 - RNA, 67 nt, Artificial Sequence
  Description of Artificial Sequence: Synthetic oligonucleotide
uagcaaguuaaaauaaggcuaguccguuaucaacuugaaaaaguggcaccgagucggugcuuuuuuu

SEQ ID NO: 393 - RNA, 39 nt, Artificial Sequence
  Description of Artificial Sequence: Synthetic oligonucleotide
aaacagcauagcaaguuaaaauaaggcuaguccguuauc

SEQ ID NO: 394 - RNA, 30 nt, Artificial Sequence
  Description of Artificial Sequence: Synthetic oligonucleotide
aaacagcauagcaaguuaaaauaaggcuag

SEQ ID NO: 395 - RNA, 22 nt, Artificial Sequence
  Description of Artificial Sequence: Synthetic oligonucleotide
aaacagcauagcaaguuaaaau

SEQ ID NO: 396 - RNA, 31 nt, Artificial Sequence
  Description of Artificial Sequence: Synthetic oligonucleotide
uagcaaguuaaaauaaggcuaguccguuauc

SEQ ID NO: 397 - RNA, 26 nt, Artificial Sequence
  Description of Artificial Sequence: Synthetic oligonucleotide
uagcaaguuaaaauaaggcuaguccg

SEQ ID NO: 398 - RNA, 22 nt, Artificial Sequence
  Description of Artificial Sequence: Synthetic oligonucleotide
uagcaaguuaaaauaaggcuag

SEQ ID NO: 399 - RNA, 26 nt, Artificial Sequence
  Description of Artificial Sequence: Synthetic oligonucleotide
guuggaaccauucaaaacagcauagc

SEQ ID NO: 400 - RNA, 62 nt, Artificial Sequence; identical to SEQ ID NO: 321
  Description of Artificial Sequence: Synthetic oligonucleotide

SEQ ID NO: 401 - RNA, 54 nt, Artificial Sequence; identical to SEQ ID NO: 322
  Description of Artificial Sequence: Synthetic oligonucleotide

SEQ ID NO: 402 - RNA, 62 nt, Artificial Sequence; identical to SEQ ID NO: 323
  Description of Artificial Sequence: Synthetic oligonucleotide

SEQ ID NO: 403 - RNA, 54 nt, Artificial Sequence; identical to SEQ ID NO: 324
  Description of Artificial Sequence: Synthetic oligonucleotide

SEQ ID NO: 404 - RNA, 62 nt, Artificial Sequence; identical to SEQ ID NO: 299
  Description of Artificial Sequence: Synthetic oligonucleotide

SEQ ID NO: 405 - RNA, 54 nt, Artificial Sequence; identical to SEQ ID NO: 300
  Description of Artificial Sequence: Synthetic oligonucleotide

SEQ ID NO: 406 - RNA, 62 nt, Artificial Sequence
  Description of Artificial Sequence: Synthetic oligonucleotide
ccaauucuuguugaauuagaguuuuagagcuagaaauagcaaguuaaaauaaggcuaguccg

SEQ ID NO: 407 - RNA, 62 nt, Artificial Sequence
  Description of Artificial Sequence: Synthetic oligonucleotide
aauuagauggugauguuaauguuuuagagcuagaaauagcaaguuaaaauaaggcuaguccg

SEQ ID NO: 408 - RNA, 62 nt, Artificial Sequence
  Description of Artificial Sequence: Synthetic oligonucleotide
aaauuuucugucaguggagaguuuuagagcuagaaauagcaaguuaaaauaaggcuaguccg

SEQ ID NO: 409 - RNA, 62 nt, Artificial Sequence
  Description of Artificial Sequence: Synthetic oligonucleotide
caucuaauucaacaagaauuguuuuagagcuagaaauagcaaguuaaaauaaggcuaguccg

SEQ ID NO: 410 - RNA, 61 nt, Artificial Sequence
  Description of Artificial Sequence: Synthetic oligonucleotide
caguagugcaaauaaauuuaguuuuagagcuagaaauagcaaguuaaaauaaggcuagccg

SEQ ID NO: 411 - DNA, 50 bp, Artificial Sequence; identical to SEQ ID NO: 302
  Description of Artificial Sequence: Synthetic oligonucleotide

SEQ ID NO: 412 - DNA, 50 bp, Artificial Sequence; identical to SEQ ID NO: 301
  Description of Artificial Sequence: Synthetic oligonucleotide

SEQ ID NO: 413 - DNA, 50 bp, Artificial Sequence; identical to SEQ ID NO: 279
  Description of Artificial Sequence: Synthetic oligonucleotide

SEQ ID NO: 414 - DNA, 50 bp, Artificial Sequence; identical to SEQ ID NO: 278
  Description of Artificial Sequence: Synthetic oligonucleotide

SEQ ID NO: 415 - DNA, 50 bp, Artificial Sequence; identical to SEQ ID NO: 305
  Description of Artificial Sequence: Synthetic oligonucleotide

SEQ ID NO: 416 - DNA, 50 bp, Artificial Sequence; identical to SEQ ID NO: 304
  Description of Artificial Sequence: Synthetic oligonucleotide

SEQ ID NO: 417 - DNA, 50 bp, Artificial Sequence
  Description of Artificial Sequence: Synthetic oligonucleotide
taatgaattccccaataggcttttttacaaattgagttatgttcatataa

SEQ ID NO: 418 - DNA, 50 bp, Artificial Sequence
  Description of Artificial Sequence: Synthetic oligonucleotide
ttatatgaacataactcaatttgtaaaaaagcctattggggaattcatta

SEQ ID NO: 419 - DNA, 50 bp, Artificial Sequence
  Description of Artificial Sequence: Synthetic oligonucleotide
taatgaattcccgttatggcttttttacaaattgagttatgttcatataa

SEQ ID NO: 420 - DNA, 50 bp, Artificial Sequence
  Description of Artificial Sequence: Synthetic oligonucleotide
ttatatgaacataactcaatttgtaaaaaagccataacgggaattcatta

SEQ ID NO: 421 - DNA, 50 bp, Artificial Sequence
  Description of Artificial Sequence: Synthetic oligonucleotide
taatgcgcgagccaagcgcacctaatttttcctcggcacttaatataacc

SEQ ID NO: 422 - DNA, 50 bp, Artificial Sequence
  Description of Artificial Sequence: Synthetic oligonucleotide
ggttatattaagtgccgaggaaaaattaggtgcgcttggctcgcgcatta

SEQ ID NO: 423 - DNA, 50 bp, Artificial Sequence; identical to SEQ ID NO: 338
  Description of Artificial Sequence: Synthetic oligonucleotide

SEQ ID NO: 424 - DNA, 50 bp, Artificial Sequence; identical to SEQ ID NO: 337
  Description of Artificial Sequence: Synthetic oligonucleotide

SEQ ID NO: 425 - DNA, 74 bp, Artificial Sequence
  Description of Artificial Sequence: Synthetic oligonucleotide
tcagtcctcatctccctcaagcaggccccgctggtgcactgaagagccaccctgtggaaacactacatctgcaa

SEQ ID NO: 426 - DNA, 74 bp, Artificial Sequence
  Description of Artificial Sequence: Synthetic oligonucleotide
ttgcagatgtagtgtttccacagggtggctcttcagtgcaccagcggggcctgcttgagggagatgaggactga

SEQ ID NO: 427 - DNA, 20 bp, Artificial Sequence
  Description of Artificial Sequence: Synthetic oligonucleotide
tgtggaaacactacatctgc

SEQ ID NO: 428 - RNA, 62 nt, Artificial Sequence
  Description of Artificial Sequence: Synthetic oligonucleotide
gcagauguaguguuuccacaguuuuagagcuagaaauagcaaguuaaaauaaggcuaguccg

SEQ ID NO: 429 - RNA, 75 nt, Artificial Sequence
  Description of Artificial Sequence: Synthetic oligonucleotide
gcagauguaguguuuccacaguuuuagagcuaugcugaaaagcauagcaaguuaaaauaaggcuaguccguuauc

SEQ ID NO: 430 - RNA, 87 nt, Artificial Sequence
  Description of Artificial Sequence: Synthetic oligonucleotide
gcagauguaguguuuccacaguuuuagagcuaugcuguuuuggaaacaaaacagcauagcaaguuaaaauaaggcuaguccguuauc

SEQ ID NO: 431 - RNA, 86 nt, Artificial Sequence
  Description of Artificial Sequence: Synthetic oligonucleotide
ggaaccauucaaaacagcauagcaaguuaaaauaaggcuaguccguuaucaacuugaaaaaguggcaccgagucggugcuuuuuuu

SEQ ID NO: 432 - RNA, 67 nt, Artificial Sequence; identical to SEQ ID NO: 392
  Description of Artificial Sequence: Synthetic oligonucleotide

SEQ ID NO: 433 - RNA, 88 nt, Streptococcus pyogenes
guuggaaccauucaaaacagcauagcaaguuaaaauaaggcuaguccguuaucaacuugaaaaaguggcaccgagucggugcuuuuuu

SEQ ID NO: 434 - RNA, 93 nt, Listeria innocua
auauuguuaguauucaaaauaacauagcaaguuaaaauaaggcuuuguccguuaucaacuuuuaauuaaguagcgcuguuucggcgcuuuuuu

SEQ ID NO: 435 - RNA, 104 nt, Streptococcus mutans
uguuggaaucauucgaaacaacacagcaaguuaaaauaaggcagugauuuuuaauccaguccguacacaacuugaaaaagugcgcaccgauucggugcuuuuuu

SEQ ID NO: 436 - RNA, 95 nt, Streptococcus thermophilus
uugugguuugaaaccauucgaaacaacacagcgaguuaaaauaaggcuuaguccguacucaacuugaaaagguggcaccgauucgguguuuuuuu

SEQ ID NO: 437 - RNA, 118 nt, Streptococcus thermophilus
uaauaauaguguaagggacgccuuacacaguuacuuaaaucuugcagaagcuacaaagauaaggcuucaugccgaaaucaacacccugucauuuuauggcaggguguuuucguuauuu

SEQ ID NO: 438 - RNA, 112 nt, Neisseria meningitidis
cauauugucgcacugcgaaaugagaaccguugcuacaauaaggccgucugaaaagaugugccgcaacgcucugccccuuaaagcuucugcuuuaaggggcaucguuuauuuc

SEQ ID NO: 439 - RNA, 110 nt, Pasteurella multocida
gcauauuguugcacugcgaaaugagagacguugcuacaauaaggcuucugaaaagaaugaccguaacgcucugccccuugugauucuuaauugcaaggggcaucguuuuu

SEQ ID NO: 440 - RNA, 115 nt, Mycoplasma mobile
uauuauguauuucgaaauacagauguacaguuaagaauacauaagaaugauacaucacuaaaaaaaggcuuuaugccguaacuacuacuuauuuucaaaauaaguaguuuuuuuu

SEQ ID NO: 441 - RNA, 26 nt, Artificial Sequence
  Description of Artificial Sequence: Synthetic oligonucleotide
uagcaaguuaaaauaaggcuaguccg

SEQ ID NO: 442 - RNA, 36 nt, Streptococcus pyogenes
uuguuggaaccauucaaaacagcauagcaaguuaaa

SEQ ID NO: 443 - RNA, 36 nt, Streptococcus mutans
guguuggaaucauucgaaacaacacagcaaguuaaa

SEQ ID NO: 444 - RNA, 36 nt, Streptococcus thermophilus
gguuugaaaccauucgaaacaacacagcgaguuaaa

SEQ ID NO: 445 - RNA, 36 nt, Streptococcus thermophilus
cuuacacaguuacuuaaaucuugcagaagcuacaaa

SEQ ID NO: 446 - RNA, 36 nt, Listeria innocua
auauuguuaguauucaaaauaacauagcaaguuaaa

SEQ ID NO: 447 - RNA, 34 nt, Listeria innocua
auuguuaguauucaaaauaacauagcaaguuaaa

SEQ ID NO: 448 - RNA, 36 nt, Treponema denticola
auuuaagauccaucuuaaauuacacaacgaguucaa

SEQ ID NO: 449 - RNA, 36 nt, Neisseria meningitidis
auugucgcacugcgaaaugagaaccguugcuacaau

SEQ ID NO: 450 - RNA, 38 nt, Neisseria meningitidis
auauugucgcacugcgaaaugagaaccguugcuacaau

SEQ ID NO: 451 - RNA, 36 nt, Streptococcus gordonii; identical to SEQ ID NO: 445

SEQ ID NO: 452 - RNA, 36 nt, Bifidobacterium bifidum
augaucaaggucauugaccugacaggcauaaauuga

SEQ ID NO: 453 - RNA, 36 nt, Lactobacillus salivarius
gguuuugaccucauugauuuaacauucugaguugaa

SEQ ID NO: 454 - RNA, 37 nt, Francisella tularensis
guuucaguuguuagauuauuugguauguacuuguguu

SEQ ID NO: 455 - RNA, 37 nt, Francisella tularensis
auuacagagcauuaauuauuugguacauuuauaauuu

SEQ ID NO: 456 - RNA, 37 nt, Legionella pneumophila
auuucaggguaucgaaauuuagaugauuucuaauuua

SEQ ID NO: 457 - RNA, 36 nt, Nitratifractor salsuginis
uguaacaggguaggguuuuuugaggggucuuaaaau

SEQ ID NO: 458 - RNA, 36 nt, Butyrivibrio fibrisolvens
aguuucuaaucacuuaauuuuuucggaccuacuaaa

SEQ ID NO: 459 - RNA, 36 nt, Streptobacillus moniliformis
gauucacauuauucaaguuuacuacagauucuguau

SEQ ID NO: 460 - RNA, 36 nt, Mycoplasma mobile
aguuaagaauacauaagaaugauacaucacuaaaaa

SEQ ID NO: 461 - RNA, 44 nt, Capnocytophaga ochracea
auugugaauugcuuucaaauugugcgacaaaaguagguauaaua

SEQ ID NO: 462 - RNA, 36 nt, Acidovorax ebreus
auugcagcaacggcucucaccccggauaaccacaau

SEQ ID NO: 463 - RNA, 36 nt, Wolinella succinogenes
auagccgcugccuacucagccauuuagcgcagcgac

SEQ ID NO: 464 - RNA, 37 nt, Wolinella succinogenes
uuuguuaaagcuggaugggauuauuauagaguguugc

SEQ ID NO: 465 - RNA, 37 nt, Wolinella succinogenes
uuucaaggcaucgaacggauuugcuauaaaguguugc

SEQ ID NO: 466 - RNA, 36 nt, Prevotella ruminicola
uuuugcacacguaagauuccuacaucuuaucacaau

SEQ ID NO: 467 - RNA, 48 nt, Fibrobacter succinogenes
auugugaauugcuuucagauuaugaaaauaauauaguuaaaauuuuug

SEQ ID NO: 468 - RNA, 36 nt, Campylobacter jejuni
auuuuauuucgauuuuaaucaacccuaaauuucaau

SEQ ID NO: 469 - RNA, 36 nt, Campylobacter jejuni
auuuuagucccuuuuuaaauuucuuaugagauuaua

SEQ ID NO: 470 - RNA, 25 nt, Campylobacter jejuni
aagaaauuuaaaaagggacuaaaau

SEQ ID NO: 471 - RNA, 36 nt, Pasteurella multocida
auuguagcaacgucucucauuucgcagugcaacaau

SEQ ID NO: 472 - RNA, 36 nt, Rhodopseudomonas palustris
gccguggcuuuccuaccgauuucccaccgcaugauu

SEQ ID NO: 473 - RNA, 36 nt, Olsenella uli
ucugaauuaccagucagaacgauacugcgagucaaa

SEQ ID NO: 474 - RNA, 36 nt, Rhodospirillum rubrum
guuccauggccccgucccacacgccaugauagagcg

SEQ ID NO: 475 - RNA, 36 nt, Rhodospirillum rubrum
aaacgggagaaccgucccacacggccaugguagagu

SEQ ID NO: 476 - RNA, 36 nt, Dinoroseobacter shibae
uuaacggcucgaccgcgaauucugaacguaaagaca

SEQ ID NO: 477 - RNA, 36 nt, Verminephrobacter eiseniae
uuagcguccagagcgcauaucccagugagauauccg

SEQ ID NO: 478 - RNA, 75 nt, Streptococcus pyogenes
aaacagcauagcaaguuaaaauaaggcuaguccguuaucaacuugaaaaaguggcaccgagucggugcuuuuuuu

SEQ ID NO: 479 - RNA, 77 nt, Listeria innocua
aaauaacauagcaaguuaaaauaaggcuuuguccguuaucaacuuuuaauuaaguagcgcuguuucggcgcuuuuuu

SEQ ID NO: 480 - RNA, 73 nt, Artificial Sequence
  Description of Artificial Sequence: Synthetic oligonucleotide
aacagcauagcaaguuaaaauaaggcuaguccguuaucaacuugaaaaaguggcaccgagucggugcuuuuuu

SEQ ID NO: 481 - RNA, 33 nt, Francisella novicida
uauaaauguaccaaauaauuaaugcucuguaau

SEQ ID NO: 482 - RNA, 74 nt, Campylobacter jejuni
aagaaauuuaaaaagggacuaaaauaaagaguuugcgggacucugcgggguuacaauccccuaaaaccgcuuuu

SEQ ID NO: 483 - RNA, 96 nt, Francisella novicida
aucuaaaauuauaaauguaccaaauaauuaaugcucuguaaucauuuaaaaguauuuugaacggaccucuguuugacacgucugaauaacuaaaaa

SEQ ID NO: 484 - RNA, 109 nt, Streptococcus thermophilus
uguaagggacgccuuacacaguuacuuaaaucuugcagaagcuacaaagauaaggcuucaugccgaaaucaacacccugucauuuuauggcaggguguuuucguuauuu

SEQ ID NO: 485 - RNA, 110 nt, Mycoplasma mobile
uguauuucgaaauacagauguacaguuaagaauacauaagaaugauacaucacuaaaaaaaggcuuuaugccguaacuacuacuuauuuucaaaauaaguaguuuuuuuu

SEQ ID NO: 486 - RNA, 92 nt, Listeria innocua
auuguuaguauucaaaauaacauagcaaguuaaaauaaggcuuuguccguuaucaacuuuuaauuaaguagcgcuguuucggcgcuuuuuuu

SEQ ID NO: 487 - RNA, 89 nt, Streptococcus pyogenes; identical to SEQ ID NO: 390

SEQ ID NO: 488 - RNA, 107 nt, Streptococcus mutans
guuggaaucauucgaaacaacacagcaaguuaaaauaaggcagugauuuuuaauccaguccguacacaacuugaaaaagugcgcaccgauucggugcuuuuuuauuu

SEQ ID NO: 489 - RNA, 96 nt, Streptococcus thermophilus
uugugguuugaaaccauucgaaacaacacagcgaguuaaaauaaggcuuaguccguacucaacuugaaaagguggcaccgauucgguguuuuuuuu

SEQ ID NO: 490 - RNA, 102 nt, Neisseria meningitidis
acauauugucgcacugcgaaaugagaaccguugcuacaauaaggccgucugaaaagaugugccgcaacgcucugccccuuaaagcuucugcuuuaaggggca

SEQ ID NO: 491 - RNA, 110 nt, Pasteurella multocida; identical to SEQ ID NO: 439

SEQ ID NO: 492 - RNA, 37 nt, Francisella novicida
aacacaaguacauaccaaauaaucuaacaacugaaac

SEQ ID NO: 493 - RNA, 37 nt, Francisella novicida
aaauuauaaauguaccaaauaauuaaugcucuguaau

SEQ ID NO: 494 - RNA, 37 nt, Wolinella succinogenes; identical to SEQ ID NO: 465

SEQ ID NO: 495 - RNA, 37 nt, Wolinella succinogenes; identical to SEQ ID NO: 464

SEQ ID NO: 496 - RNA, 37 nt, Unknown
  Description of Unknown: gamma Proteobacterium oligonucleotide
auuucaguguauagaauguugggaugcauucugaaua

SEQ ID NO: 497 - RNA, 37 nt, Unknown
  Description of Unknown: gamma Proteobacterium oligonucleotide
auaacaagggaguauuugcuggaauaagcucugaaac

SEQ ID NO: 498 - RNA, 37 nt, Sutterella wadsworthensis
guuuccaagcaauagcucguggcguuaugauuucugu

SEQ ID NO: 499 - RNA, 37 nt, Sutterella wadsworthensis
ggugauuuccuauagcucauagcguuaugaucucuaa

SEQ ID NO: 500 - RNA, 37 nt, Legionella pneumophila; identical to SEQ ID NO: 456

SEQ ID NO: 501 - RNA, 36 nt, Listeria innocua; identical to SEQ ID NO: 446

SEQ ID NO: 502 - RNA, 36 nt, Streptococcus thermophilus; identical to SEQ ID NO: 444

SEQ ID NO: 503 - RNA, 36 nt, Streptococcus mutans; identical to SEQ ID NO: 443

SEQ ID NO: 504 - RNA, 36 nt, Streptococcus pyogenes; identical to SEQ ID NO: 442

SEQ ID NO: 505 - RNA, 36 nt, Fusobacterium nucleatum
auuuuuaauuuaaguaauaaaaaauggagcauauac

SEQ ID NO: 506 - RNA, 36 nt, Filifactor alocis
aguugacuaccauaugagauuacacuacacgguuca

SEQ ID NO: 507 - RNA, 36 nt, Treponema denticola; identical to SEQ ID NO: 448

SEQ ID NO: 508 - RNA, 36 nt, Solobacterium moorei
cuuauaccaguaagauaauuuacauaguaaguucaa

SEQ ID NO: 509 - RNA, 36 nt, Veillonella atypica
guuuuggagguuuacagaauuacacuacgaguucaa

SEQ ID NO: 510 - RNA, 36 nt, Finegoldia magna
guuuaauaccuauaugagauuacaucaugaguucaa

SEQ ID NO: 511 - RNA, 36 nt, Olsenella uli; identical to SEQ ID NO: 473

SEQ ID NO: 512 - RNA, 36 nt, Lactobacillus rhamnosus
caacuugaauugauugaucugacaucuacgaguuga

SEQ ID NO: 513 - RNA, 36 nt, Lactobacillus gasseri
ugauuagauuucauugaucuaacagccaucuaaaac

SEQ ID NO: 514 - RNA, 36 nt, Lactobacillus gasseri
acacuaaacuuuauugaucuaacaaccagauuuaaa

SEQ ID NO: 515 - RNA, 36 nt, Oenococcus kitaharae
ggguucuaccucauugaucugacacacagcauugaa

SEQ ID NO: 516 - RNA, 36 nt, Bifidobacterium bifidum; identical to SEQ ID NO: 452

SEQ ID NO: 517 - RNA, 36 nt, Staphylococcus pseudintermedius
guuuuacuucuuucuaaauaaacauaguuaaguuaa

SEQ ID NO: 518 - RNA, 36 nt, Eubacterium rectale
auuuuauagucacguaaauuuuucagaucuacuaaa

SEQ ID NO: 519 - RNA, 38 nt, Enterococcus faecalis
auuuuacugauaagaaauuauugagaaucuacaaaaau

SEQ ID NO: 520 - RNA, 36 nt, Streptococcus thermophilus; identical to SEQ ID NO: 445

SEQ ID NO: 521 - RNA, 36 nt, Staphylococcus lugdunensis
cuuguacuuauaccuaaaauuacagaaucuacugaa

SEQ ID NO: 522 - RNA, 36 nt, Eubacterium dolichum
aucauaaucuagcaaaaguuuauaugaucuaacaaa

SEQ ID NO: 523 - RNA, 36 nt, Mycoplasma mobile; identical to SEQ ID NO: 460

SEQ ID NO: 524 - RNA, 36 nt, Mycoplasma ovipneumoniae
auuuuacucuaguaagaaauugucgcacaaaaauaa

SEQ ID NO: 525 - RNA, 36 nt, Mycoplasma gallisepticum
auuauugcuuacacaauuauugucgugcuaaaauaa

SEQ ID NO: 526 - RNA, 36 nt, Mycoplasma canis
auuauuguuuacccaaauauuguacauccuaaauca

SEQ ID NO: 527 - RNA, 36 nt, Mycoplasma synoviae
uacuuacuuaacaaaauaauuguacgauuccaaaau

SEQ ID NO: 528 - RNA, 36 nt, Aminomonas paucivorans
gccuucccucccugccgaaggagcagauccucuccu

SEQ ID NO: 529 - RNA, 36 nt, Clostridium perfringens
uuauaguaacuaguuaaacucucgauaugcuauacc

SEQ ID NO: 530 - RNA, 36 nt, Clostridium cellulolyticum
auuauagcaacaauucaggcuccgauaugccauaau

SEQ ID NO: 531 - RNA, 36 nt, Acidovorax ebreus; identical to SEQ ID NO: 462

SEQ ID NO: 532 - RNA, 36 nt, Neisseria meningitidis; identical to SEQ ID NO: 449

SEQ ID NO: 533 - RNA, 36 nt, Pasteurella multocida
auuguugcacugcgaaaugagagacguugcuacaau

SEQ ID NO: 534 - RNA, 36 nt, Unknown
  Description of Unknown: phylotype Rs-D17 oligonucleotide
uuuguaacuuaucugagagaggaugguuauuauaau

SEQ ID NO: 535 - RNA, 36 nt, Wolinella succinogenes; identical to SEQ ID NO: 463

SEQ ID NO: 536 - RNA, 36 nt, Campylobacter jejuni
auaauacaaaaaucauuuuuuuaaacaaacauaaac

SEQ ID NO: 537 - RNA, 36 nt, Campylobacter jejuni
uauaaucucauaagaaauuuaaaaagggacuaaaau

SEQ ID NO: 538 - RNA, 36 nt, Helicobacter mustelae
guauuugucaauaaauauacuuuauaauggcaagau

SEQ ID NO: 539 - RNA, 36 nt, Roseburia intestinalis
uuguaauaaccuaauuaucacuugguaugauauaau

SEQ ID NO: 540 - RNA, 36 nt, Lactobacillus coryniformis
uuuuauucuauaguaaguuuucagcuaaaauagauc

SEQ ID NO: 541 - RNA, 36 nt, Rhodopseudomonas palustris; identical to SEQ ID NO: 472

SEQ ID NO: 542 - RNA, 36 nt, Puniceispirillum marinum
  Candidatus Puniceispirillum marinum
uaaccauaggcuccucaaucaccagaguguuauugc

SEQ ID NO: 543 - RNA, 36 nt, Verminephrobacter eiseniae; identical to SEQ ID NO: 477

SEQ ID NO: 544 - RNA, 36 nt, Ralstonia syzygii
guuaguagcaaagcgcaauucccgaucugcuggaaa

SEQ ID NO: 545 - RNA, 36 nt, Azospirillum sp.
  B510
uuaacggcuggacccccgauccccaucgaauuucca

SEQ ID NO: 546 - RNA, 36 nt, Dinoroseobacter shibae; identical to SEQ ID NO: 476

SEQ ID NO: 547 - RNA, 36 nt, Rhodospirillum rubrum; identical to SEQ ID NO: 474

SEQ ID NO: 548 - RNA, 36 nt, Rhodospirillum rubrum; identical to SEQ ID NO: 475

SEQ ID NO: 549 - RNA, 36 nt, Spirochaeta sp.
  strain Buddy
auuagagauaaucgcugguuuuuguuaagauauaac

SEQ ID NO: 550 - RNA, 36 nt, Prevotella ruminicola; identical to SEQ ID NO: 466

SEQ ID NO: 551 - RNA, 36 nt, Flavobacterium columnare
agauaaaauuauucuaaucuuuaaucuuaucacaau

SEQ ID NO: 552 - RNA, 36 nt, Parvibaculum lavamentivorans
cuugcgaaaagcgaccgccucucgauuugcuacaga

SEQ ID NO: 553 - RNA, 44 nt, Capnocytophaga ochracea; identical to SEQ ID NO: 461

SEQ ID NO: 554 - RNA, 48 nt, Fibrobacter succinogenes; identical to SEQ ID NO: 467

SEQ ID NO: 555 - RNA, 36 nt, Nitratifractor salsuginis; identical to SEQ ID NO: 457

SEQ ID NO: 556 - RNA, 36 nt, Akkermansia muciniphila
cuuauacgggaacuccacgauaaggcauuuuacaug

SEQ ID NO: 557 - RNA, 88 nt, Artificial Sequence
  Description of Artificial Sequence: Synthetic oligonucleotide
uuggaaccauucaaaacagcauagcaaguuaaaauaaggcuaguccguuaucaacuugaaaaaguggcaccgagucggugcuuuuuuu

SEQ ID NO: 558 - RNA, 77 nt, Artificial Sequence
  Description of Artificial Sequence: Synthetic oligonucleotide
caaaacagcauagcaaguuaaaauaaggcuaguccguuaucaacuugaaaaaguggcaccgagucggugcuuuuuuu

SEQ ID NO: 559 - RNA, 61 nt, Artificial Sequence
  Description of Artificial Sequence: Synthetic oligonucleotide
caaaacagcauagcaaguuaaaauaaggcuaguccguuaucaacuugaaaaaguuuuuuuu

SEQ ID NO: 560 - RNA, 44 nt, Artificial Sequence
  Description of Artificial Sequence: Synthetic oligonucleotide
caaaacagcauagcaaguuaaaauaaggcuaguccguuuuuuuu

SEQ ID NO: 561 - RNA, 72 nt, Artificial Sequence
  Description of Artificial Sequence: Synthetic oligonucleotide
caaaacagcauagcaaguuaaaauaaggcuaguccgguucacugccguauaggcagcuaagaaauuuuuuuu

SEQ ID NO: 562 - RNA, 14 nt, Artificial Sequence
  Description of Artificial Sequence: Synthetic oligonucleotide
uagcaaguuaaaau

SEQ ID NO: 563 - RNA, 102 nt, Artificial Sequence
  Description of Artificial Sequence: Synthetic polynucleotide
  modified_base (1)..(80): a, c, u or g
  misc_feature (1)..(80): This region may encompass anywhere from 12 to 80 nucleotides; wherein some positions may be absent
nnnnnnnnnnnnnnnnnnnnnnnnnnnnnnnnnnnnnnnnnnnnnnnnnnnnnnnnnnnnnnnnnnnnnnnnnnnnnnnnguuuuagagcuaugcuguuuug

SEQ ID NO: 564 - RNA, 102 nt, Artificial Sequence
  Description of Artificial Sequence: Synthetic polynucleotide
  modified_base (1)..(80): a, c, u or g
  misc_feature (1)..(80): This region may encompass anywhere from 12 to 80 nucleotides; wherein some positions may be absent
nnnnnnnnnnnnnnnnnnnnnnnnnnnnnnnnnnnnnnnnnnnnnnnnnnnnnnnnnnnnnnnnnnnnnnnnnnnnnnnnguuuuagagcuauguuauuuug

SEQ ID NO: 565 - RNA, 92 nt, Unknown
  Description of Unknown: Exemplary polynucleotide
  modified_base (1)..(80): a, c, u or g
  misc_feature (1)..(80): This region may encompass anywhere from 12 to 80 nucleotides; wherein some positions may be absent
nnnnnnnnnnnnnnnnnnnnnnnnnnnnnnnnnnnnnnnnnnnnnnnnnnnnnnnnnnnnnnnnnnnnnnnnnnnnnnnnguuuuagagcua

SEQ ID NO: 566 - RNA, 152 nt, Artificial Sequence
  Description of Artificial Sequence: Synthetic polynucleotide
  modified_base (37)..(116): a, c, u or g
  misc_feature (37)..(116): This region may encompass anywhere from 12 to 80 nucleotides; wherein some positions may be absent
guuuuagagcuaugcuguuuugaauggucccaaaacnnnnnnnnnnnnnnnnnnnnnnnnnnnnnnnnnnnnnnnnnnnnnnnnnnnnnnnnnnnnnnnnnnnnnnnnnnnnnnnnguuuuagagcuaugcuguuuugaauggucccaaaac

SEQ ID NO: 567 - RNA, 188 nt, Artificial Sequence
  Description of Artificial Sequence: Synthetic polynucleotide
  modified_base (37)..(116): a, c, u or g
  misc_feature (37)..(116): This region may encompass anywhere from 12 to 80 nucleotides; wherein some positions may be absent
guuuuagagcuaugcuguuuugaauggucccaaaacnnnnnnnnnnnnnnnnnnnnnnnnnnnnnnnnnnnnnnnnnnnnnnnnnnnnnnnnnnnnnnnnnnnnnnnnnnnnnnnnguuuuagagcuaugcuguuuugaauggucccaaaacguuuuagagcuaugcuguuuugaauggucccaaaac

SEQ ID NO: 568 - RNA, 22 nt, Unknown
  Description of Unknown: Exemplary polynucleotide
guuuuagagcuaugcuguuuug

SEQ ID NO: 569 - RNA, 36 nt, Streptococcus pyogenes
guuuuagagcuaugcuguuuugaauggucccaaaac

SEQ ID NO: 570 - RNA, 36 nt, Pasteurella multocida
guuguaguucccucucucauuucgcagugcuacaau

SEQ ID NO: 571 - RNA, 36 nt, Mycoplasma mobile
guuuugguguaguaucauucuuauguauucuuaaac

SEQ ID NO: 572 - RNA, 37 nt, Francisella novicida
guuucaguugcugaauuauuugguaaacuacuguuag

SEQ ID NO: 573 - RNA, 33 nt, Francisella novicida
guuucaguugcugaauuauuugguaaacuacug

SEQ ID NO: 574 - RNA, 36 nt, Streptococcus mutans
guuuuagagcuguguuguuucgaaugguuccaaaac

SEQ ID NO: 575 - RNA, 36 nt, Streptococcus thermophilus; identical to SEQ ID NO: 574

SEQ ID NO: 576 - RNA, 36 nt, Streptococcus thermophilus
guuuuuguacucucaagauuuaaguaacuguacaac

SEQ ID NO: 577 - RNA, 36 nt, Listeria innocua
guuuuagagcuauguuauuuugaaugcuaacaaaac

SEQ ID NO: 578 - RNA, 36 nt, Treponema denticola
guuugagaguuguguaauuuaagauggaucucaaac

SEQ ID NO: 579 - RNA, 36 nt, Neisseria meningitidis
guuguagcucccuuucucauuucgcagugcuacaau

SEQ ID NO: 580 - RNA, 36 nt, Streptococcus gordonii; identical to SEQ ID NO: 576

SEQ ID NO: 581 - RNA, 35 nt, Bifidobacterium bifidum
guuucaaugccugucagaucaaugacuuugaccac

SEQ ID NO: 582 - RNA, 36 nt, Lactobacillus salivarius
guuucagaaguauguuaaaucaauaagguuaagacc

SEQ ID NO: 583 - RNA, 37 nt, Francisella novicida
cuaacaguaguuuaccaaauaauucagcaacugaaac

SEQ ID NO: 584 - RNA, 37 nt, Francisella novicida; identical to SEQ ID NO: 583

SEQ ID NO: 585 - RNA, 37 nt, Legionella pneumophila
ccaauaaucccucaucuaaaaauccaaccacugaaac

SEQ ID NO: 586 - RNA, 36 nt, Nitratifractor salsuginis
guuuuaagaccccucaaaaccccacccuguuacaau

SEQ ID NO: 587 - RNA, 36 nt, Butyrivibrio fibrisolvens
guuuuaguacccgggaaaauuaagugauuggaaaac

SEQ ID NO: 588 - RNA, 36 nt, Streptobacillus moniliformis
gauacagauucuugguaaauuugaauaaugugaaug

SEQ ID NO: 589 - RNA, 36 nt, Mycoplasma mobile; identical to SEQ ID NO: 571

SEQ ID NO: 590 - RNA, 44 nt, Capnocytophaga ochracea
uguuaucaaucgcaaaacuacaaaauuugaaagcaauucacaac

SEQ ID NO: 591 - RNA, 36 nt, Acidovorax ebreus
aguguagcuauccggggugagagagggagcuacaac

SEQ ID NO: 592 - RNA, 36 nt, Wolinella succinogenes
auuauagcgaggaauggcugaguaggcggcuauaac

SEQ ID NO: 593 - RNA, 37 nt, Wolinella succinogenes
gcaacacuuuauagcaaauccgcuuagccugugaaac

SEQ ID NO: 594 - RNA, 37 nt, Wolinella succinogenes; identical to SEQ ID NO: 593

SEQ ID NO: 595 - RNA, 36 nt, Prevotella ruminicola
guugugguuugauguaggaaaggaaugauauacaac

SEQ ID NO: 596 - RNA, 48 nt, Fibrobacter succinogenes
guuguuauugcacuaguaaaacuagaaaaucugaaagcaauucacaac

SEQ ID NO: 597 - RNA, 36 nt, Campylobacter jejuni
auuuuaccauaaagaaauuuaaaaagggacuaaaac

SEQ ID NO: 598 - RNA, 36 nt, Campylobacter jejuni
guuuuagucccuuuuuaaauuucuuuaugguaaaau

SEQ ID NO: 599 - RNA, 36 nt, Pasteurella multocida
auuguagcacugcgaaaugagagagggaacuacaac

SEQ ID NO: 600 - RNA, 36 nt, Rhodopseudomonas palustris
agccuaccacggggaaaucgguagggaagccacggc

SEQ ID NO: 601 - RNA, 36 nt, Olsenella uli
guuuuggggcagugucguuuugacugguaaucaaac

SEQ ID NO: 602 - RNA, 36 nt, Rhodospirillum rubrum
acucuaccauggcggugugggacggggccauggaac

SEQ ID NO: 603 - RNA, 36 nt, Rhodospirillum rubrum; identical to SEQ ID NO: 602

SEQ ID NO: 604 - RNA, 36 nt, Dinoroseobacter shibae
aguuuagcuguucagaauucgggguccagccgcaac

SEQ ID NO: 605 - RNA, 36 nt, Verminephrobacter eiseniae
auuguagcucacugggauaugcgcacuggccggaac

SEQ ID NO: 606 - RNA, 37 nt, Francisella novicida; identical to SEQ ID NO: 572

SEQ ID NO: 607 - RNA, 37 nt, Francisella novicida; identical to SEQ ID NO: 572

SEQ ID NO: 608 - RNA, 37 nt, Wolinella succinogenes; identical to SEQ ID NO: 593

SEQ ID NO: 609 - RNA, 37 nt, Wolinella succinogenes; identical to SEQ ID NO: 593

SEQ ID NO: 610 - RNA, 37 nt, Unknown
  Description of Unknown: gamma Proteobacterium oligonucleotide
guuucagagcuuaucccaacaaaccaacagcugaaac

SEQ ID NO: 611 - RNA, 37 nt, Unknown; identical to SEQ ID NO: 610
  Description of Unknown: gamma Proteobacterium oligonucleotide

SEQ ID NO: 612 - RNA, 37 nt, Sutterella wadsworthensis
gcgaagaucauaacgcuacgagcuauagcacugaaac

SEQ ID NO: 613 - RNA, 37 nt, Sutterella wadsworthensis; identical to SEQ ID NO: 612

SEQ ID NO: 614 - RNA, 37 nt, Legionella pneumophila; identical to SEQ ID NO: 585

SEQ ID NO: 615 - RNA, 36 nt, Listeria innocua; identical to SEQ ID NO: 577

SEQ ID NO: 616 - RNA, 36 nt, Streptococcus thermophilus; identical to SEQ ID NO: 574

SEQ ID NO: 617 - RNA, 36 nt, Streptococcus mutans; identical to SEQ ID NO: 574

SEQ ID NO: 618 - RNA, 36 nt, Streptococcus pyogenes; identical to SEQ ID NO: 569

SEQ ID NO: 619 - RNA, 36 nt, Fusobacterium nucleatum
guuugagaguaauguuauuuuaaauagauucaaaac

SEQ ID NO: 620 - RNA, 36 nt, Filifactor alocis
guuugagaguaguguaauuucauaugguagucaaac

SEQ ID NO: 621 - RNA, 36 nt, Treponema denticola; identical to SEQ ID NO: 578

SEQ ID NO: 622 - RNA, 36 nt, Solobacterium moorei
guuugagaacuauguaaauuaugcugguagcaaaac

SEQ ID NO: 623 - RNA, 36 nt, Veillonella atypica
guuugcgaguaguguaauucuguaaaucucuaaaac

SEQ ID NO: 624 - RNA, 36 nt, Finegoldia magna
guuugagaaugauguaauuucauauagguauuaaac

SEQ ID NO: 625 - RNA, 36 nt, Olsenella uli; identical to SEQ ID NO: 601

SEQ ID NO: 626 - RNA, 36 nt, Lactobacillus rhamnosus
gucucagguagaugucagaucaaucaguucaagagc

SEQ ID NO: 627 - RNA, 36 nt, Lactobacillus gasseri
guuuuagaugguuguuagaucaauaagguuuagauc

SEQ ID NO: 628 - RNA, 36 nt, Lactobacillus gasseri; identical to SEQ ID NO: 627

SEQ ID NO: 629 - RNA, 36 nt, Oenococcus kitaharae
gcuucagaugugugucagaucaaugagguagaaccc

SEQ ID NO: 630 - RNA, 36 nt, Bifidobacterium bifidum
guuucagaugccugucagaucaaugacuuugaccac

SEQ ID NO: 631 - RNA, 36 nt, Staphylococcus pseudintermedius
guuuuagcacuauguuuauuuagaaagagguaaaac

SEQ ID NO: 632 - RNA, 36 nt, Eubacterium rectale
auuuuaguaacugaauaauuuacgugacuguaaaac

SEQ ID NO: 633 - RNA, 36 nt, Enterococcus faecalis
guuuuuguauucucaauaauuucuuaucaguaaaac

SEQ ID NO: 634 - RNA, 36 nt, Streptococcus thermophilus; identical to SEQ ID NO: 576

SEQ ID NO: 635 - RNA, 36 nt, Staphylococcus lugdunensis
guuuuaguacucuguaauuuuagguauaagugauac

SEQ ID NO: 636 - RNA, 36 nt, Eubacterium dolichum
guuuuguuaccauauggauuuuugcuagauuaagac

SEQ ID NO: 637 - RNA, 36 nt, Mycoplasma mobile; identical to SEQ ID NO: 571

SEQ ID NO: 638 - RNA, 36 nt, Mycoplasma ovipneumoniae
guuuuugugcuguacaauuucuuacuagaguaaaac

SEQ ID NO: 639 - RNA, 36 nt, Mycoplasma gallisepticum
guuuuagcacuguacaauacuuguguaagcaauaac

SEQ ID NO: 640 - RNA, 36 nt, Mycoplasma canis
guuuuaguguuguacaauauuuggguaaacaauaac

SEQ ID NO: 641 - RNA, 36 nt, Mycoplasma synoviae
guuuugggguuguacaauuauuuuguuaaguaaaac

SEQ ID NO: 642 - RNA, 36 nt, Aminomonas paucivorans
agcauagcauuucggagugcggcagggagcuaugac

SEQ ID NO: 643 - RNA, 36 nt, Clostridium perfringens
auuauagcauaucgagaauuuacuaggaacuauaac

SEQ ID NO: 644 - RNA, 36 nt, Clostridium cellulolyticum
auuauagcauaucggagccugaauuggagcuauaac

SEQ ID NO: 645 - RNA, 36 nt, Acidovorax ebreus; identical to SEQ ID NO: 591

SEQ ID NO: 646 - RNA, 36 nt, Neisseria meningitidis; identical to SEQ ID NO: 579

SEQ ID NO: 647 - RNA, 36 nt, Pasteurella multocida; identical to SEQ ID NO: 570

SEQ ID NO: 648 - RNA, 36 nt, Unknown
  Description of Unknown: phylotypeRs-D oligonucleotide
guuauaguuuccuuccucucucagaugugcuauaau

SEQ ID NO: 649 - RNA, 36 nt, Wolinella succinogenes; identical to SEQ ID NO: 592

SEQ ID NO: 650 - RNA, 36 nt, Campylobacter jejuni; identical to SEQ ID NO: 598

SEQ ID NO: 651 - RNA, 36 nt, Campylobacter jejuni; identical to SEQ ID NO: 598

SEQ ID NO: 652 - RNA, 36 nt, Helicobacter mustelae
auuuuagcauaaacauauuuaugaaguggcuaaaac

SEQ ID NO: 653 - RNA, 36 nt, Roseburia intestinalis
auuauaccauaccaagugauaacagggaauuacaac

SEQ ID NO: 654 - RNA, 36 nt, Lactobacillus coryniformis
gaucuauuuuagcugaaaacugaaggaaucaauagc

SEQ ID NO: 655 - RNA, 36 nt, Rhodopseudomonas palustris; identical to SEQ ID NO: 600

SEQ ID NO: 656 - RNA, 36 nt, Puniceispirillum marinum
  Candidatus Puniceispirillum marinum
aguauagcacucuggugauugagagccuagagcaac

SEQ ID NO: 657 - RNA, 36 nt, Verminephrobacter eiseniae; identical to SEQ ID NO: 605

SEQ ID NO: 658 - RNA, 36 nt, Ralstonia syzygii
agguuagcagaucgggaauugcgcucuggcuacaac

SEQ ID NO: 659 - RNA, 36 nt, Azospirillum sp.
  B510
aguguagccgauggggaucggggguccagccgcaac

SEQ ID NO: 660 - RNA, 36 nt, Dinoroseobacter shibae; identical to SEQ ID NO: 604

SEQ ID NO: 661 - RNA, 36 nt, Rhodospirillum rubrum; identical to SEQ ID NO: 602

SEQ ID NO: 662 - RNA, 36 nt, Rhodospirillum rubrum; identical to SEQ ID NO: 602

SEQ ID NO: 663 - RNA, 36 nt, Spirochaeta sp.
  strain Buddy
ggucaaucuuaacaaaaaucagcggucauccccaac

SEQ ID NO: 664 - RNA, 36 nt, Prevotella ruminicola; identical to SEQ ID NO: 595

SEQ ID NO: 665 - RNA, 36 nt, Flavobacterium columnare
guugugguuugauuaaagauuagaaaacacgauauu

SEQ ID NO: 666 - RNA, 36 nt, Parvibaculum lavamentivorans
agaguagcaaaucgagagacggccgcaauccgcagc

SEQ ID NO: 667 - RNA, 44 nt, Capnocytophaga ochracea; identical to SEQ ID NO: 590

SEQ ID NO: 668 - RNA, 48 nt, Fibrobacter succinogenes; identical to SEQ ID NO: 596

SEQ ID NO: 669 - RNA, 36 nt, Nitratifractor salsuginis; identical to SEQ ID NO: 586

SEQ ID NO: 670 - RNA, 36 nt, Akkermansia muciniphila
guuguacugugccuuauuuuggauucaaggcaaaac

SEQ ID NO: 671 - RNA, 44 nt, Artificial Sequence
  Description of Artificial Sequence: Synthetic oligonucleotide
guuuuagagcuagaaauagcaaguuaaaauaaggcuaguccguu

SEQ ID NO: 672 - RNA, 60 nt, Artificial Sequence
  Description of Artificial Sequence: Synthetic oligonucleotide
  modified_base (13)..(17): a, c, u or g
guuuuagagcuannnnnuagcaaguuaaaauaaguuaaaauaaggcuaguccguuaucaa

SEQ ID NO: 673 - RNA, 68 nt, Artificial Sequence
  Description of Artificial Sequence: Synthetic oligonucleotide
guuuuagagcuaugcugaaaagcauagcaaguuaaaaauaaguuaaaauaaggcuaguccguuaucaa

SEQ ID NO: 674 - RNA, 69 nt, Artificial Sequence
  Description of Artificial Sequence: Synthetic oligonucleotide
guuuuagagcuaugcuguuuuggaaacaaaacagcauagcaaguuaaaauaaggcuaguccguuaucaa

SEQ ID NO: 675 - RNA, 70 nt, Artificial Sequence
  Description of Artificial Sequence: Synthetic oligonucleotide
guuuuagagcuaguuuuagagcuagaaauagcaaguuaaaauuagcaaguuaaaauaaggcuaguccguu

SEQ ID NO: 676 - RNA, 70 nt, Artificial Sequence
  Description of Artificial Sequence: Synthetic oligonucleotide
guuuuagagcuauagcaaguuaaaaugaaaguuuuagagcuauagcaaguuaaaauaaggcuaguccguu

SEQ ID NO: 677 - RNA, 74 nt, Artificial Sequence
  Description of Artificial Sequence: Synthetic oligonucleotide
guuuuagagcuagaaauagcaaguuaaaauguuuuagagcuagaaauagcaaguuaaaauaaggcuaguccguu

SEQ ID NO: 678 - RNA, 119 nt, Artificial Sequence
  Description of Artificial Sequence: Synthetic polynucleotide
guuuuagagcuaugcuguuuuggaaacaaaacagcauagcaaguuaaaauguuuuagagcuaugcuguuuuggaaacaaaacagcauagcaaguuaaaauaaggcuaguccguuaucaa

SEQ ID NO: 679 - RNA, 12 nt, Artificial Sequence
  Description of Artificial Sequence: Synthetic oligonucleotide
guuuuagagcua

SEQ ID NO: 680 - RNA, 218 nt, Artificial Sequence
  Description of Artificial Sequence: Synthetic polynucleotide
  modified_base (1)..(80): a, c, u or g
  misc_feature (1)..(80): This region may encompass anywhere from 12 to 80 nucleotides; wherein some positions may be absent
  modified_base (93)..(192): a, c, u or g
  misc_feature (93)..(192): This region may encompass anywhere from 3 to 100 nucleotides; wherein some positions may be absent
nnnnnnnnnnnnnnnnnnnnnnnnnnnnnnnnnnnnnnnnnnnnnnnnnnnnnnnnnnnnnnnnnnnnnnnnnnnnnnnnguuuuagagcuannnnnnnnnnnnnnnnnnnnnnnnnnnnnnnnnnnnnnnnnnnnnnnnnnnnnnnnnnnnnnnnnnnnnnnnnnnnnnnnnnnnnnnnnnnnnnnnnnnnuagcaaguuaaaauaaggcuaguccg

SEQ ID NO: 681 - RNA, 219 nt, Artificial Sequence
  Description of Artificial Sequence: Synthetic polynucleotide
  modified_base (1)..(80): a, c, u or g
  misc_feature (1)..(80): This region may encompass anywhere from 12 to 80 nucleotides; wherein some positions may be absent
  modified_base (93)..(192): a, c, u or g
  misc_feature (93)..(192): This region may encompass anywhere from 3 to 100 nucleotides; wherein some positions may be absent
nnnnnnnnnnnnnnnnnnnnnnnnnnnnnnnnnnnnnnnnnnnnnnnnnnnnnnnnnnnnnnnnnnnnnnnnnnnnnnnnguuuuagagcuannnnnnnnnnnnnnnnnnnnnnnnnnnnnnnnnnnnnnnnnnnnnnnnnnnnnnnnnnnnnnnnnnnnnnnnnnnnnnnnnnnnnnnnnnnnnnnnnnnnuagcaaguuaaaauaaggcuuuguccg

SEQ ID NO: 682 - RNA, 163 nt, Artificial Sequence
  Description of Artificial Sequence: Synthetic polynucleotide
  modified_base (1)..(80): a, c, u or g
  misc_feature (1)..(80): This region may encompass anywhere from 12 to 80 nucleotides; wherein some positions may be absent
nnnnnnnnnnnnnnnnnnnnnnnnnnnnnnnnnnnnnnnnnnnnnnnnnnnnnnnnnnnnnnnnnnnnnnnnnnnnnnnnguuuuagagcuagaaauagcaaguuaaaauaaggcuaguccguuaucaacuugaaaaaguggcaccgagucggugcuuuuuuu

SEQ ID NO: 683 - RNA, 39 nt, Artificial Sequence
  Description of Artificial Sequence: Synthetic oligonucleotide
aucaacuugaaaaaguggcaccgagucggugcuuuuuuu

SEQ ID NO: 684 - RNA, 33 nt, Artificial Sequence
  Description of Artificial Sequence: Synthetic oligonucleotide
aaaaucaaaggaucuucuugagauccuuuuuuu

SEQ ID NO: 685 - RNA, 34 nt, Artificial Sequence
  Description of Artificial Sequence: Synthetic oligonucleotide
cgccgaaaaccccgcuucggcgggguuuugccgc

SEQ ID NO: 686 - RNA, 34 nt, Artificial Sequence
  Description of Artificial Sequence: Synthetic oligonucleotide
cgcaaaaaaccccgcuucggcgggguuuuuucgc

SEQ ID NO: 687 - RNA, 39 nt, Artificial Sequence
  Description of Artificial Sequence: Synthetic oligonucleotide
aaaaaaaaaccccgccccugacagggcgggguuuuuuuu

SEQ ID NO: 688 - RNA, 40 nt, Artificial Sequence
  Description of Artificial Sequence: Synthetic oligonucleotide
cgcaaaaaaccccgccccugacagggcgggguuuuuucgc

SEQ ID NO: 689 - RNA, 41 nt, Artificial Sequence
  Description of Artificial Sequence: Synthetic oligonucleotide
ucacacuggcucaccuucgggugggccuuucugcguuuaua

SEQ ID NO: 690 - RNA, 46 nt, Artificial Sequence
  Description of Artificial Sequence: Synthetic oligonucleotide
agagaauauaaaaagccagauuauuaauccggcuuuuuuauuauuu

SEQ ID NO: 691 - RNA, 80 nt, Artificial Sequence
  Description of Artificial Sequence: Synthetic oligonucleotide
ccaggcaucaaauaaaacgaaaggcucagucgaaagacugggccuuucguuuuaucuguuguuugucggugaacgcucuc

SEQ ID NO: 692 - RNA, 123 nt, Artificial Sequence
  Description of Artificial Sequence: Synthetic polynucleotide
aucaaaauuuacggcuuugaaaaaguaauuucgugaccuucgguauaagguuacuacuagauucaggugcucaucagaugcaccacauucucuauaaaaaaaaaugguaucuuucuuauuuga

SEQ ID NO: 693 - RNA, 129 nt, Artificial Sequence
  Description of Artificial Sequence: Synthetic polynucleotide
ccaggcaucaaauaaaacgaaaggcucagucgaaagacugggccuuucguuuuaucuguuguuugucggugaacgcucucuacuagagucacacuggcucaccuucgggugggccuuucugcguuuaua

SEQ ID NO: 694 - RNA, 129 nt, Artificial Sequence
  Description of Artificial Sequence: Synthetic polynucleotide
gcaugugcucuguauguauauaaaacucuuguuuucuucuuuucucuaaauauucuuuccuuauacauuaggaccuuugcagcauaaauuacuauacuucuauuacuagagcccgccgccaccauggag

SEQ ID NO: 695 - RNA, 139 nt, Artificial Sequence
  Description of Artificial Sequence: Synthetic polynucleotide
auuccgauaacuuguuuauugcagcuuauaaugguuacaaauaaagcaauagcaucacaaauuucacaaauaaagcauuuuuuucacugcauucuaguugugguuuguccaaacucaucaauguaucuuaucaugucug

SEQ ID NO: 696 - RNA, 225 nt, Artificial Sequence
  Description of Artificial Sequence: Synthetic polynucleotide
uaauaagcgaauuucuuaugauuuaugauuuuuauuauuaaauaaguuauaaaaaaaauaaguguauacaaauuuuaaagugacucuuagguuuuaaaacgaaaauucuuauucuugaguaacucuuuccuguaggucagguugcuuucucagguauagcaugaggucgcucuuauugaccacaccucuaccggcaugccgagcaaaugccugcaaaucgcuccc

SEQ ID NO: 697 - RNA, 53 nt, Artificial Sequence
  Description of Artificial Sequence: Synthetic oligonucleotide
aacuuucaguuuagcggucuguuuuagagcuagaaauagcaaguuaaaauaag

SEQ ID NO: 698 - DNA, 31 bp, Artificial Sequence
  Description of Artificial Sequence: Synthetic oligonucleotide
aaggtacccagaccgctaaactgaaagttac

SEQ ID NO: 699 - DNA, 31 bp, Artificial Sequence
  Description of Artificial Sequence: Synthetic oligonucleotide
gtaactttcagtttagcggtctgggtacctt

SEQ ID NO: 700 - DNA, 40 bp, Artificial Sequence
  Description of Artificial Sequence: Synthetic oligonucleotide
agtttttaaaagagcttggcggttgttttagtcccttttt

SEQ ID NO: 701 - DNA, 42 bp, Artificial Sequence
  Description of Artificial Sequence: Synthetic oligonucleotide
caaagtttcattagttgaatttaactgttttagtcccttttt

SEQ ID NO: 702 - DNA, 42 bp, Artificial Sequence
  Description of Artificial Sequence: Synthetic oligonucleotide
aagaatgaggatgatgatattttacagttttagtcccttttt

SEQ ID NO: 703 - DNA, 42 bp, Artificial Sequence
  Description of Artificial Sequence: Synthetic oligonucleotide
gtgtgctaaaaaaaatggacttaaatgttttagtcccttttt

SEQ ID NO: 704 - DNA, 74 bp, Artificial Sequence
  Description of Artificial Sequence: Synthetic oligonucleotide
aagaaatttaaaaagggactaaaataaagagtttgcgggactctgcggggttacaatcccctaaaaccgctttt

SEQ ID NO: 705 - DNA, 54 bp, Artificial Sequence
  Description of Artificial Sequence: Synthetic oligonucleotide
ataactcgaccaatatttgacaaagtttcagttgctgaattatttggtaaacct

SEQ ID NO: 706 - DNA, 58 bp, Artificial Sequence
  Description of Artificial Sequence: Synthetic oligonucleotide
ggcaggttttgtatggtcatataggagtgtttcagttgctgaattatttggtaaacct

SEQ ID NO: 707 - DNA, 69 bp, Artificial Sequence
  Description of Artificial Sequence: Synthetic oligonucleotide
agctatagggttacctatcttttgagtgttggcaaataagtttcagttgctgaattatttggtaaacct

SEQ ID NO: 708 - DNA, 54 bp, Artificial Sequence
  Description of Artificial Sequence: Synthetic oligonucleotide
atgcttttaaactactgatatatacgtttcagttgctgaattatttggtaaact

SEQ ID NO: 709 - DNA, 80 bp, Artificial Sequence
  Description of Artificial Sequence: Synthetic oligonucleotide
gtaccaaataattaatgctctgtaatcatttaaaagtattttgaacggacctctgtttgacacgtctgaataactaaaaa

SEQ ID NO: 710 - DNA, 52 bp, Artificial Sequence
  Description of Artificial Sequence: Synthetic oligonucleotide
tatccattcccagccggaaattaagttgtagctccctttctcatttcgcagt

SEQ ID NO: 711 - DNA, 53 bp, Artificial Sequence
  Description of Artificial Sequence: Synthetic oligonucleotide
gcctttttacaagctcgctttctttgttgtagctccctttctcatttcgcagt

SEQ ID NO: 712 - DNA, 53 bp, Artificial Sequence
  Description of Artificial Sequence: Synthetic oligonucleotide
taaaggtttctgttgcgacccgaatgttgtagctccctttctcatttcgcagt

SEQ ID NO: 713 - DNA, 55 bp, Artificial Sequence
  Description of Artificial Sequence: Synthetic oligonucleotide
taactttgaccgtgtgcaatccagttagttgtagctccctttctcatttcgcagt

SEQ ID NO: 714 - DNA, 52 bp, Artificial Sequence
  Description of Artificial Sequence: Synthetic oligonucleotide
aacccactaaattttgcaaatgcggttgtagctccctttctcatttcgcagt

SEQ ID NO: 715 - DNA, 53 bp, Artificial Sequence
  Description of Artificial Sequence: Synthetic oligonucleotide
tttttttgtactgttgtttgaacgagttgtagctccctttctcatttcgcagt

SEQ ID NO: 716 - DNA, 55 bp, Artificial Sequence
  Description of Artificial Sequence: Synthetic oligonucleotide
ttcgtttcagatagcaaacgcagtagtgttgtagctccctttctcatttcgcagt

SEQ ID NO: 717 - DNA, 84 bp, Artificial Sequence
  Description of Artificial Sequence: Synthetic oligonucleotide
atatgacggtgggcaactggtacaggttgtagctccctttctcatttcgcagtgctacaatgccggatatgacggtgggcaact

SEQ ID NO: 718 - DNA, 52 bp, Artificial Sequence
  Description of Artificial Sequence: Synthetic oligonucleotide
cttttgtattgattcaaggtgcttgttgtagctccctttctcatttcgcagt

SEQ ID NO: 719 - DNA, 55 bp, Artificial Sequence
  Description of Artificial Sequence: Synthetic oligonucleotide
attcgtcgatgatggaaactcgagcatgttgtagctccctttctcatttcgcagt

SEQ ID NO: 720 - DNA, 55 bp, Artificial Sequence
  Description of Artificial Sequence: Synthetic oligonucleotide
tagccagtgctaaaaccgcacccgcttgttgtagctccctttctcatttcgcagt

SEQ ID NO: 721 - DNA, 54 bp, Artificial Sequence
  Description of Artificial Sequence: Synthetic oligonucleotide
atagaaatacatacgccgagtaattagttgtagctccctttctcatttcgcagt

SEQ ID NO: 722 - DNA, 54 bp, Artificial Sequence
  Description of Artificial Sequence: Synthetic oligonucleotide
tttttgtaattgttctgccttttttagttgtagctccctttctcatttcgcagt

SEQ ID NO: 723 - DNA, 53 bp, Artificial Sequence
  Description of Artificial Sequence: Synthetic oligonucleotide
acggcggaaaccattgccacaaaacgttgtagctccctttctcatttcgcagt

SEQ ID NO: 724 - DNA, 54 bp, Artificial Sequence
  Description of Artificial Sequence: Synthetic oligonucleotide
aataataacccaatacacgatgttaagttgtagctccctttctcatttcgcagt

SEQ ID NO: 725 - DNA, 171 bp, Artificial Sequence
  Description of Artificial Sequence: Synthetic polynucleotide
ttgtcttatttatatacaaatagattattgacttatcatctcacaacggctagaatcccaaacatattgtcgcactgcgaaatgagaaccgttgctacaataaggccgtctgaaaagatgtgccgcaacgctctgccccttaaagcttctgctttaaggggcatcgtttat

SEQ ID NO: 726 - DNA, 35 bp, Artificial Sequence
  Description of Artificial Sequence: Synthetic oligonucleotide
ggtaactttgcctaggatagttttagagctatgtt

SEQ ID NO: 727 - DNA, 22 bp, Artificial Sequence
  Description of Artificial Sequence: Synthetic oligonucleotide
cattatgttttagagctatgtt

SEQ ID NO: 728 - DNA, 24 bp, Artificial Sequence
  Description of Artificial Sequence: Synthetic oligonucleotide
gagttttagagctatgttattttg

SEQ ID NO: 729 - DNA, 27 bp, Artificial Sequence
  Description of Artificial Sequence: Synthetic oligonucleotide
ttatagttttagagctatgttattttg

SEQ ID NO: 730 - DNA, 26 bp, Artificial Sequence
  Description of Artificial Sequence: Synthetic oligonucleotide
taaatgttttagagctatgttatttt

SEQ ID NO: 731 - DNA, 23 bp, Artificial Sequence
  Description of Artificial Sequence: Synthetic oligonucleotide
tacaagttttagagctatgttat

SEQ ID NO: 732 - DNA, 30 bp, Artificial Sequence
  Description of Artificial Sequence: Synthetic oligonucleotide
ttcatgttgttttagagctatgttattttg

SEQ ID NO: 733 - DNA, 28 bp, Artificial Sequence
  Description of Artificial Sequence: Synthetic oligonucleotide
gttttagagctatgctatttcgaatact

SEQ ID NO: 734 - DNA, 92 bp, Artificial Sequence
  Description of Artificial Sequence: Synthetic oligonucleotide
attgttagtattcaaaataacatagcaagttaaaataaggctttgtccgttatcaacttttaattaagtagcgctgtttcggcgcttttttt

SEQ ID NO: 735 - DNA, 43 bp, Artificial Sequence
  Description of Artificial Sequence: Synthetic oligonucleotide
gccattaattaatatggtgagttttagagctgtgttgtttcga

SEQ ID NO: 736 - DNA, 43 bp, Artificial Sequence
  Description of Artificial Sequence: Synthetic oligonucleotide
gctagcgcagttagtgctctgttttagagctgtgttgtttcga

SEQ ID NO: 737 - DNA, 43 bp, Artificial Sequence
  Description of Artificial Sequence: Synthetic oligonucleotide
tgttgtgtcatcatagttaggttttagagctgtgttgtttcga

SEQ ID NO: 738 - DNA, 43 bp, Artificial Sequence
  Description of Artificial Sequence: Synthetic oligonucleotide
caattagacaatagacaaacgttttagagctgtgttgtttcga

SEQ ID NO: 739 - DNA, 44 bp, Artificial Sequence
  Description of Artificial Sequence: Synthetic oligonucleotide
ttcggacatgacttgccacagttttagagctgtgttgttatcga

SEQ ID NO: 740 - DNA, 107 bp, Artificial Sequence
  Description of Artificial Sequence: Synthetic polynucleotide
gttggaatcattcgaaacaacacagcaagttaaaataaggcagtgatttttaatccagtccgtacacaacttgaaaaagtgcgcaccgattcggtgcttttttattt

SEQ ID NO: 741 - RNA, 20 nt, Artificial Sequence
  Description of Artificial Sequence: Synthetic oligonucleotide
ugguccgcugccguucgcuu

SEQ ID NO: 742 - RNA, 20 nt, Artificial Sequence
  Description of Artificial Sequence: Synthetic oligonucleotide
gcagaaaaaaaccauggguu

SEQ ID NO: 743 - RNA, 20 nt, Artificial Sequence
  Description of Artificial Sequence: Synthetic oligonucleotide
aaaaaaccgguucagcugcc

SEQ ID NO: 744 - RNA, 20 nt, Artificial Sequence
  Description of Artificial Sequence: Synthetic oligonucleotide
aacuuucaguuuagcggucu

SEQ ID NO: 745 - RNA, 20 nt, Artificial Sequence
  Description of Artificial Sequence: Synthetic oligonucleotide
aggacaguuucagguagucc

SEQ ID NO: 746 - RNA, 20 nt, Artificial Sequence
  Description of Artificial Sequence: Synthetic oligonucleotide
aaccgguuuuuuagccaugu

SEQ ID NO: 747 - RNA, 20 nt, Artificial Sequence
  Description of Artificial Sequence: Synthetic oligonucleotide
uugacagcuagcucaguccu

SEQ ID NO: 748 - RNA, 20 nt, Artificial Sequence
  Description of Artificial Sequence: Synthetic oligonucleotide
cccggaagagagucaauuca

SEQ ID NO: 749 - RNA, 20 nt, Artificial Sequence
  Description of Artificial Sequence: Synthetic oligonucleotide
cccugaauugacucucuucc

SEQ ID NO: 750 - RNA, 20 nt, Artificial Sequence
  Description of Artificial Sequence: Synthetic oligonucleotide
gaauucauuaaagaggagaa

SEQ ID NO: 751 - RNA, 20 nt, Artificial Sequence
  Description of Artificial Sequence: Synthetic oligonucleotide
gaauggugcaaaaccuuucg

SEQ ID NO: 752 - DNA, 141 bp, Artificial Sequence
  Description of Artificial Sequence: Synthetic polynucleotide
cgacaccatcgaatggtgcaaaacctttcgcggtatggcatgatagcgcccggaagagagtcaattcagggtggtgaatttgacagctagctcagtcctaggtataatagatctgaattcattaaagaggagaaaggtacc

SEQ ID NO: 753 - RNA, 20 nt, Artificial Sequence
  Description of Artificial Sequence: Synthetic oligonucleotide
aacuuucaguuuagcggucu

SEQ ID NO: 754 - RNA, 20 nt, Artificial Sequence
  Description of Artificial Sequence: Synthetic oligonucleotide
uggaaccguacuggaacugc

SEQ ID NO: 755 - RNA, 20 nt, Artificial Sequence
  Description of Artificial Sequence: Synthetic oligonucleotide
gguaguccgggaugucagcc

SEQ ID NO: 756 - RNA, 20 nt, Artificial Sequence
  Description of Artificial Sequence: Synthetic oligonucleotide
aggacaguuucagguagucc

SEQ ID NO: 757 - RNA, 20 nt, Artificial Sequence
  Description of Artificial Sequence: Synthetic oligonucleotide
gucuugcagggaggaguccu

SEQ ID NO: 758 - RNA, 20 nt, Artificial Sequence
  Description of Artificial Sequence: Synthetic oligonucleotide
gcauaaccggaccgucggac

SEQ ID NO: 759 - RNA, 20 nt, Artificial Sequence
  Description of Artificial Sequence: Synthetic oligonucleotide
cuuucagagcaccgucuucc

SEQ ID NO: 760 - RNA, 20 nt, Artificial Sequence
  Description of Artificial Sequence: Synthetic oligonucleotide
gaugguguagucuucguugu

SEQ ID NO: 761 - RNA, 20 nt, Artificial Sequence
  Description of Artificial Sequence: Synthetic oligonucleotide
caucuaauucaacaagaauu

SEQ ID NO: 762 - RNA, 20 nt, Artificial Sequence
  Description of Artificial Sequence: Synthetic oligonucleotide
caucuaauucaacaagaauu

SEQ ID NO: 763 - RNA, 20 nt, Artificial Sequence
  Description of Artificial Sequence: Synthetic oligonucleotide
aguagugcaaauaaauuuaa

SEQ ID NO: 764 - RNA, 20 nt, Artificial Sequence
  Description of Artificial Sequence: Synthetic oligonucleotide
acaaguguuggccacggaac

SEQ ID NO: 765 - RNA, 20 nt, Artificial Sequence
  Description of Artificial Sequence: Synthetic oligonucleotide
uuucaugugauccggauaac

SEQ ID NO: 766 - RNA, 20 nt, Artificial Sequence
  Description of Artificial Sequence: Synthetic oligonucleotide
cguuccuguacauaaccuuc

SEQ ID NO: 767 - RNA, 20 nt, Artificial Sequence
  Description of Artificial Sequence: Synthetic oligonucleotide
uaacucgauacgauuaacaa

SEQ ID NO: 768 - RNA, 20 nt, Artificial Sequence
  Description of Artificial Sequence: Synthetic oligonucleotide
auaauggucugcuaguugaa

SEQ ID NO: 769 - RNA, 20 nt, Artificial Sequence
  Description of Artificial Sequence: Synthetic oligonucleotide
auguggucacgcuuuucguu

SEQ ID NO: 770 - RNA, 20 nt, Artificial Sequence
  Description of Artificial Sequence: Synthetic oligonucleotide
aacuuucaguuuagcggucu

SEQ ID NO: 771 - RNA, 20 nt, Artificial Sequence
  Description of Artificial Sequence: Synthetic oligonucleotide
uggaaccguacuggaacugc

SEQ ID NO: 772 - RNA, 20 nt, Artificial Sequence
  Description of Artificial Sequence: Synthetic oligonucleotide
gaugguguagucuucguugu

SEQ ID NO: 773 - RNA, 20 nt, Artificial Sequence
  Description of Artificial Sequence: Synthetic oligonucleotide
uuccggguacauacguucgg

SEQ ID NO: 774 - RNA, 20 nt, Artificial Sequence
  Description of Artificial Sequence: Synthetic oligonucleotide
gguaguccgggaugucagcc

SEQ ID NO: 775 - RNA, 20 nt, Artificial Sequence
  Description of Artificial Sequence: Synthetic oligonucleotide
aggacaguuucagguagucc

SEQ ID NO: 776 - RNA, 20 nt, Artificial Sequence
  Description of Artificial Sequence: Synthetic oligonucleotide
uugacagcuagcucaguccu

SEQ ID NO: 777 - RNA, 20 nt, Artificial Sequence
  Description of Artificial Sequence: Synthetic oligonucleotide
aaccgguuuuuuagccaugu

SEQ ID NO: 778 - RNA, 20 nt, Artificial Sequence
  Description of Artificial Sequence: Synthetic oligonucleotide
aaaaaaccgguucagcugcc

SEQ ID NO: 779 - RNA, 20 nt, Artificial Sequence
  Description of Artificial Sequence: Synthetic oligonucleotide
uugggaagggcgaucggugc

SEQ ID NO: 780 - RNA, 20 nt, Artificial Sequence
  Description of Artificial Sequence: Synthetic oligonucleotide
gcuggccugguucaccacgc

SEQ ID NO: 781 - RNA, 20 nt, Artificial Sequence
  Description of Artificial Sequence: Synthetic oligonucleotide
guagccaaaucgggaaaaac

SEQ ID NO: 782 - RNA, 20 nt, Artificial Sequence
  Description of Artificial Sequence: Synthetic oligonucleotide
cgguaagccuucgcacauau

SEQ ID NO: 783 - RNA, 20 nt, Artificial Sequence
  Description of Artificial Sequence: Synthetic oligonucleotide
acaagaaccauucgagaguc

SEQ ID NO: 784 - RNA, 20 nt, Artificial Sequence
  Description of Artificial Sequence: Synthetic oligonucleotide
gucaagcagcaguauaugcu

SEQ ID NO: 785 - RNA, 20 nt, Artificial Sequence
  Description of Artificial Sequence: Synthetic oligonucleotide
ugugaguuagcucacucauu

SEQ ID NO: 786 - RNA, 20 nt, Artificial Sequence
  Description of Artificial Sequence: Synthetic oligonucleotide
auguuguguggaauugugag

SEQ ID NO: 787 - RNA, 20 nt, Artificial Sequence
  Description of Artificial Sequence: Synthetic oligonucleotide
cuuccggcucguauguugug

SEQ ID NO: 788 - RNA, 20 nt, Artificial Sequence
  Description of Artificial Sequence: Synthetic oligonucleotide
gggcgaggagcuguucaccg

SEQ ID NO: 789 - RNA, 20 nt, Artificial Sequence
  Description of Artificial Sequence: Synthetic oligonucleotide
ggccacaaguucagcguguc

SEQ ID NO: 790 - RNA, 20 nt, Artificial Sequence
  Description of Artificial Sequence: Synthetic oligonucleotide
gcccuugcucaccaugguug

SEQ ID NO: 791 - RNA, 20 nt, Artificial Sequence
  Description of Artificial Sequence: Synthetic oligonucleotide
gaccaggaugggcaccaccc

SEQ ID NO: 792 - RNA, 20 nt, Artificial Sequence
  Description of Artificial Sequence: Synthetic oligonucleotide
gguggugcagaugaacuuca

SEQ ID NO: 793 - RNA, 20 nt, Artificial Sequence
  Description of Artificial Sequence: Synthetic oligonucleotide
guggucacgagggugggcca

SEQ ID NO: 794 - RNA, 20 nt, Artificial Sequence
  Description of Artificial Sequence: Synthetic oligonucleotide
gcacggggccgucgccgaug

SEQ ID NO: 795 - protein, 240 aa, Acetobacter aceti
MANIAENLVFGIDLGIGSCGWAVLNQKAKDENIVALGSWCFDVPETDKERIPTNQIRRANRLLRRVIRRRRNRMAEIRRLFASKGMLDTADPDALAKISADPWEMRAKGLDYQLTPQEFAVALGHIAKRRGFKSAAKRVSTNAPSEDSKMLAALEKTKEQSAQYRTIGEMFARDPAYADRRRNRDGCFDRTMSREDLFKETQILFESQRRLGNFSATSETEQAFIDIAFRQKPMQDSERL

SEQ ID NO: 796 - protein, 400 aa, Acetobacter aceti
SFERFRLLCRLVNLRVTDGLEDRPLTPEELRLACEDAGKTRKLSVKKVRSLIGLRDDQRFTTIPPDQEQHDIAARTGDALTGTATFRAILGESFWRQLLPHPEQLDRAAWIISFHELTDTIISKLATIGLPSEVMELIRKALEDGKFSKFKGAASLSDKAARKLIPFLQEGLTYDKACQKAGYNHAASKFTHYDSIDTKAKFNSLMDDVRDSITNPVARKAISEGMKQVWAMRNQWGLPGAICIELARDVGNSAEKRREIESGIKKNTAQRERERQEAKEHLNQSDISSETLLRYRLWKEQGGRCCYTDQPITPSQLIASDNSVQVDHILPWSRFGDDSYLNKALCTAKANQEKKNRTPWEWIHNQKGVEAWNHFTAAVESRKETRGLKKRNFLLKSSKE

SEQ ID NO: 797 - protein, 376 aa, Acetobacter aceti
YAARVMAEAVRLLYPSGNRAEKGGVKRVFTRPGALTAALRHAWGVESLKKINGKRLNDDRHHALDAAVVAAVSEKEIQKLTKSFQICEQKGLARPMRDVPMPWEGFRHQLETAYADIRVARPERRRARGKGHDATIRQLREEKDGPVVYERRAISDLKLTDLERIKDPERNSAIISSLRTWIEKGKPADYPPQSPKGDEIRKIRVMSRNKPAVSVRGGTADRGEMTRVDVFTKMGKKGKPEWFLVPIYRHQVIDRIQWPQPPNQAAANGKSEKNWPTMGLEHEFRFSLYPRSYVQIVKRDGEIIEGYFAGLDRTVAAFSLLSSSDPTSIQRGIGAKTLESIRKYNVNRFGDISMVEQETRTWHGDVCISPDQPDSA

SEQ ID NO: 798 - protein, 1054 aa, Actinobacillus suis
MKLTPLNYILGLDLGIASVGWAVVEIDEQENPLGLIDVGVRTFDRAEVPKTGESLALARRLARSARRLVKRRADRIKKAKRLLKAENILLSADEHLPNDVWQLRVKGLDQKLERQEWAAVLLHLLKHRGYLSQRKNESKSENKELGALLSGVETNHQILQSAEYRTPAEIAVKKFHVEDGHIRNQRGAYTHTFSRLDLLAEMELLFQRQTDLGNPHTSAKLLENLTALLMWQKPALAGEAILKMLGKCTFEPTEYKAAKNSYSAERFVWLTKLNNLRILEQGAERALTDNERFALLDQPYEKAKFTYAQARTMLALPDEAIFKGVRYQGEDKKAVETKTILMEMKAYHQIRKALENADLKAEWNELKNNSELLDDIGTAFSLHKTDEDICRYLDGKLSESILNALLENLNFDKFIQLSLKALQQILPLMLQGQRYDEAVSAIYGDHYGKKSAEINRLLPTIPADEIRNPVVLRTLTQARKVINAVVRLYGSPARIHIETGREVGKSYQDRKKLEKQQEDNRKQRESAVKKFKEYFPNFVGEPKGKDILKMRLYELQQAKCLYSGKSLELHRLLEKGYVEVDHALPFSRTWDDSFNNKVLVLANENQNKGNLTPYEWLDGKNNSEHWQNFVARVQTSGFSHTKKQRILSHKLDEKGFIERNLNDTRYVARFLCNFIADNMLLTGKGKRKVFASNGQITALLRGRWGLQKVRDDNDRHHALDAVVVACSTVVMQQKITRFVRYEEGNVFSGERIDRETGEIIPLHFPSPWAFFRENVEIRIFSENPKLELENRLPDYPQYNHEFVQPLFVSRMPTRKMTGQGHMETVKSAKRLDEGLSVLKVPLTQLKLSDLERMVNREREVTLYESLKARLEQFGNDPAKAFAEPFHKKGGAVVKAVRVEQTQKSGVLVRDGNGVADNASMVRVDVFTKGGKYFLVPIYTWQVAKGILPNKAVTANVDEIDWLEMDESYQFIFTMYPNDLVKVKLKKEEFFGYYGGLDRATGAIVIKEHDLEKSKGKQGIYRIGVKLALSFEKYQVDELGKNIRPCRPTKRQHVR

SEQ ID NO: 799 - protein, 239 aa, Actinobacillus ureae
MEIRIFSENPKLGLENRLPGYPQYNHEFVQPLFVSRMPTRKMTGKGHMETVKSAKRLDEGLSVLKVPLTQLKLSDLERMVNREREDALYQSLKAHLEQFGNDPAKAFAEPFHKKGGTVVKAVRVEQTQKSGVLVRDGNGVADNTSMVRVDVFTKAGKYFLVPIYKWQVAKRILPNKAVTAGVDEIDWLEMDSSYQFIFTMYANDLVKVKLKKRSILGLLRWFRSCNWGYCYQRTRFREI

SEQ ID NO: 800 - protein, 400 aa, Actinobacillus ureae
MKLTPLNYILGLDLGIASVGWAVVEIDEQENPLGLIDVGVRTFDRAEVAKTGESLALARRLARSSRRLVKRRADRIKKAKRLLKAENLLLSADEILPNDVWQLRVKGLDQKLERQEWAAVLLHILKHRGYLSQRKNESKSENKELGALLSGVATNHQLLQTAEYRTPAEITVKKFQAEENGHGHIRNQRGDYSHTFDRKDLLAEMKLLFQRQAELGNPHTSEKLLENLTTLLLWQKPALAGEAILKMLGKCTFEPAEYKAAKNSYSAERFVWLTKLNNLRILENGIERALTDNERFTLLDQPYEKAKLTYAQARTMLALSDEAIFKGVRYQGEDKKAAEKVALIEMKGYQHIRKALEGAGLKAEWNELKNNSELLDDIGTAFSLYFSISNLPTEIAYFTP

SEQ ID NO: 801 - protein, 1113 aa, Actinomyces georgiae
MSASSQNVERIRYKVGIDVGLRSIGFCAVQVDADDRPVKLLNTVVHVHDAGVSPADAKKADTRKLVSGVARRTRRLYRTRKRRLVDLDRQLDGLGWPLVDPARFADPREPWFAREKLVSGRVDDADERKELLSVALRHIAHHRGWRNPYSTVESLQADAPPSEFLQGLNQRVSEKLGTELDPGLTQGQLVAKLLHRFPNAKIRGPEGILRGKLHQSDNAGELRLICRTQGLDCHITEELVRLVFQAKSPKANKEMRKRIGRDQLPGQGAHIRAEKAHPVFQRFRIVAVLANLRIREAHVDRRLTAEEMRTLTDFLLGLAGSEQPTWEELADNLNIERHQLRGTAKASVDGAPALRFPPIDATTDRIYASKLKWLAEWWRQADEERRGYMVDALSNSGGSEDEPYLDDEIAEMLEQASEEDQAKLDSLHLPGGRASYCLDTLRRLTDAMLGGGLDLFEARKAVFHVDDDWAPPTDPIGAPVGNPPVDRVLKHVARWLEAATGRWGAPQTINIEHVREGLGSEKAARELTRMNDRRRRNNQKLVEEMGEKLGMSGRIRRSDRMRYEAIRRQNCECLYCGQPITYQTMEMDHIVPRAGAASTNSRSNLAAVCRRCNHQKGKLPFAVWAESQDSPAEVRLQDAVQRVRHWLRDAGMGQKELQALRVQVIARLKSKRPDEEFDGRSMESIAWMANELRARVEAQYRGSGTTVRVYRGALTAEARKASGFEGRVNLIGGRGKDRFDRRHHAMDALVIALMNQSVAQTLALRLNMRDSQWLTQSEQTWRQFHGAPGEAARKWEAWDRDMRDASDLFNLALDGGRIPITENVRLRVGNGRVHEDGVIRFKPEYEVKGKTIKGGEARLLGDSLPSEQIDRAETPALWTALTRLPEYDRKSGLPENPDRVIRVNGAVVQATDRIRFFGTPASVAVRGGYAKLGESIHHARIYRINGKTPKYAMIRVYTIDLMRLNHEDIFTAVLKPSTISMRCAEKKLKYAIAEGNAEQIGWLVEGDQLELDAAAYAKGVGADLMREYPMATCWRVAGFPDEAKLRLRPVLLAAEGMGEDAPKFMREVLENQGWRPAVNALLSPGSVRVVRRNVLGEPRFKSSGHLPTTVDLV

SEQ ID NO: 802 - protein, 1101 aa, Actinomyces naeslundii
MWYASLMSAHHLRVGIDVGTHSVGLATLRVDDHGTPIELLSALSHIHDSGVGKEGKKDHDTRKKLSGIARRARRLLHHRRTQLQQLDEVLRDLGFPIPTPGEFLDLNEQTDPYRVWRVRARLVEEKLPEELRGPAISMAVRHIARHRGWRNPYSKVESLLSPAEESPFMKALRERILATTGEVLDDGITPGQAMAQVALTHNISMRGPEGILGKLHQSDNANEIRKICARQGVSPDVCKQLLRAVFKADSPRGSAVSRVAPDPLPGQGSFRRAPKCDPEFQRFRIISIVANLRISETKGENRPLTADERRHVVTFLTEDSQADLTWVDVAEKLGVHRRDLRGTAVHTDDGERSAARPPIDATDRIMRQTKISSLKTWWEEADSEQRGAMIRYLYEDPTDSECAEIIAELPEEDQAKLDSLHLPAGRAAYSRESLTALSDHMLATTDDLHEARKRLFGVDDSWAPPAEAINAPVGNPSVDRTLKIVGRYLSAVESMWGTPEVIHVEHVRDGFTSERMADERDKANRRRYNDNQEAMKKIQRDYGKEGYISRGDIVRLDALELQGCACLYCGTTIGYHTCQLDHIVPQAGPGSNNRRGNLVAVCERCNRSKSNTPFAVWAQKCGIPHVGVKEAIGRVRGWRKQTPNTSSEDLTRLKKEVIARLRRTQEDPEIDERSMESVAWMANELHHRIAAAYPETTVMVYRGSITAAARKAAGIDSRINLIGEKGRKDRIDRRHHAVDASVVALMEASVAKTLAERSSLRGEQRLTGKEQTWKQYTGSTVGAREHFEMWRGHMLHLTELFNERLAEDKVYVTQNIRLRLSDGNAHTVNPSKLVSHRLGDGLTVQQIDRACTPALWCALTREKDFDEKNGLPAREDRAIRVHGHEIKSSDYIQVFSKRKKTDSDRDETPFGAIAVRGGFVEIGPSIHHARIYRVEGKKPVYAMLRVFTHDLLSQRHGDLFSAVIPPQSISMRCAEPKLRKAITTGNATYLGWVVVGDELEINVDSFTKYAIGRFLEDFPNTTRWRICGYDTNSKLTLKPIVLAAEGLENPSSAVNEIVELKGWRVAINVLTKVHPTVVRRDALGRPRYSSRSNLPTSWTIE

SEQ ID NO: 803 - protein, 1181 aa, Actinomyces sp.
MLHCIAVIRVPPSEEPGFFETHADSCALCHHGCMTYAANDKAIRYRVGIDVGLRSIGFCAVEVDDEDHPIRILNSVVHVHDAGTGGPGETESLRKRSGVAARARRRGRAEKQRLKKLDVLLEELGWGVSSNELLDSHAPWHIRKRLVSEYIEDETERRQCLSVAMAHIARHRGWRNSFSKVDTLLLEQAPSDRMQGLKERVEDRTGLQFSEEVTQGELVATLLEHDGDVTIRGFVRKGGKATKVHGVLEGKYMQSDLVAELRQICRTQRVSETTFEKLVLSIFHSKEPAPSAARQRERVGLDELQLALDPAAKQPRAERAHPAFQKFKVVATLANMRIREQSAGERSLTSEELNRVARYLLNHTESESPTWDDVARKLEVPRHRLRGSSRASLETGGGLTYPPVDDTTVRVMSAEVDWLADWWDCANDESRGHMIDAISNGCGSEPDDVEDEEVNELISSATAEDMLKLELLAKKLPSGRVAYSLKTLREVTAAILETGDDLSQAITRLYGVDPGWVPTPAPIEAPVGNPSVDRVLKQVARWLKFASKRWGVPQTVNIEHTREGLKSASLLEEERERWERFEARREIRQKEMYKRLGISGPFRRSDQVRYEILDLQDCACLYCGNEINFQTFEVDHIIPRVDASSDSRRTNLAAVCHSCNSAKGGLAFGQWVKRGDCPSGVSLENAIKRVRSWSKDRLGLTEKAMGKRKSEVISRLKTEMPYEEFDGRSMESVAWMAIELKKRIEGYFNSDRPEGCAAVQVNAYSGRLTACARRAAHVDKRVRLIRLKGDDGHHKNRFDRRNHAMDALVIALMTPAIARTIAVREDRREAQQLTRAFESWKNFLGSEERMQDRWESWIGDVEYACDRLNELIDADKIPVTENLRLRNSGKLHADQPESLKKARRGSKRPRPQRYVLGDALPADVINRVTDPGLWTALVRAPGFDSQLGLPADLNRGLKLRGKRISADFPIDYFPTDSPALAVQGGYVGLEFHHARLYRIIGPKEKVKYALLRVCAIDLCGIDCDDLFEVELKPSSISMRTADAKLKEAMGNGSAKQIGWLVLGDEIQIDPTKFPKQSIGKFLKECGPVSSWRVSALDTPSKITLKPRLLSNEPLLKTSRVGGHESDLVVAECVEKIMKKTGWVVEINALCQSGLIRVIRRNALGEVRTSPKSGLPISLNLR

SEQ ID NO: 804 - protein, 1120 aa, Actinomyces sp.
MNAMKQYNAGIDVGINSVGFAAIEVDSKGLPLNILNNMVVLHDSGVDPGTAKTGATRLANSGTARRTRKLIARRRKRLQKLDRYIEVQGWPLVDFSSLPDPYTPWKIRAKLTQDRLEGEEQGRGLSIALRHMARHRGWRNPYEGVESLHSPKEASKQFKDLKDRVTKVSGVIFDEDATPAEVVCDIGLSPKQRLRSAPSAKYKEGATLADEPVGGKSKEGLLGGKLMQSDNANELRKIGIVQGLSNEKVNEIIDQVFASESPKGQAGKRAKKDELPGQEQYVRALRAHLAFQRFRIVAAVANLRILEAEPKHERLLSQSEKDKVIEFLMSADGDDGVTWSDVAEELGIERECLSGTAKRGADGERPSSFPPTNSTNISIVRSKVKPLIEWWRKASDDEQATLVTALSNADELTDDQPSAETVRQFLSSPDEQSQEKIDKISLPKGRAAYSVNSLERLTRRMLKDSVDLFEARKREFGVDNNWTPTPDSIGEPVGNPAVDRVLKIVNRWLLAVTRKWGPPKVVNIEHVRVGFTSAAQTRKYEEENKTNRERNLAILEELRDKFGTSGKIRREDITRFAALRRQNCQCAYCGEAITFFDCEMDHIVPRKGPGSTNTRNNLVAICERCNKSKSNMPFSLWAQNCDIPGVSVEAVIDRVRTWIKDPELNPKQYNNFKKDVIERLRKTVDDDAIDNRSIESVAWMATELADRIGSHFRTAGANTKVRVYRGWLTSEARKASGFEGKINLIGGRGKTRLDRRHHAMDAATIALMRQSVAQTLVERASIRESDRLRRVVSSSWKDYRGADRDKQFSYGSWLNSMNALAELFNRAIDADGIPVTQNLRLRLGNGEAHDATIRSLEKKRVGASWTIGEIDRASTPQLWLALTRQEDFDQNDGLPANASRELRVKNHWFHAEENVTLFPTKSAAIAVRGGYAEIGNTIHHARLYKLPGKKLTYGMIRVFAIDLLCAWHTDLFSSPLLPESISLRTAETKVRRAVEDGAAMYIGWLVDGDEIVLDPETKAFKSNKIGEYLCEFPGTKRWKVDGFPDKEKLRLRPLQLAGEGLPEDVSAGTEEILGPKGNGWRVAINALFKSSQLVVVRRTALGMVRKLSRRHLPLTTRLRG

SEQ ID NO: 805 - protein, 1095 aa, Actinomyces sp.
MPAHHLRVGIDVGTHSVGLATLRVDDQGTPIELLSALSHIHDSGIGKEGQKDHDTRKKLSGVARRTRHLLRNRRERLQQLDKVLVDLGFPIPKPEEYPDLSERTDPYRVWRVRARLVEETLPEELRGPAISMAVRHIARHRGWRNPYSKVESLLSPAEESSFMKALRKRIMTKTGEVLDDDITPGQAMAQVALTHKIYMRGPEGILGKLHQSDNANEIRKICARQGISSDVCKQLLRAVFKAESPRGSAVSRVAPDPLPGQGSFRRAPKCDPEFQRFRIISIVANLRISETKGENRPLTVDERRQVVAFLMEDSQADLTWVDVAEKLRVSRQALRGTAMLTADGERSAAQPPIDVTDQIMRKTKISALKTWWDKADAERRGAMVRYLYEGLEDSECAEVIAKLPEKDHAKLDSLHLPAGRAAYSRESLTALSDHMLETTNDLHEARKRLFGVDDSWAPPAEPVGAPVGNPSVDRTLKIVARYLSAVESIWGTPEVIHVEHVRDGFTSERTAEERDKANRSRHNDNQKAIEKIQHDYGKEGYISRGDIVRFHALKLQGSACLYCGTTIGYHTCQLDHIVPQAGPGSNNRRGNLVAVCERCNHSKSNTPFAVWAQKCGIPHVGVKEAISRVNGWVEHNHSTSSGDLTRLKKEVIARLRRTQKDPEIDERSMESVAWMANELHHRIAAAYPETTVMVYRGSITAAARKAASIESRINLIGEKGRKDRLDRRHHAVDASVVALMEPSVAKTLAERSSLRGEQRLTGQEQTWKQYTGLTVGARERFEAWRGHMHRLTELFNESLAADEVYVTQNIRLRLSDGSAHTVKASKLVSHRLGDGLTVQQIDRACTPALWCALTREIDFDEKNGLPAREDRVIRVHGQEISSADCIQVFSKRKKTKSDRDEAPFGAIAVRGGFVEIGSSIHHARIYRIEGEKPAYAMLRVFTHDLLSQRHGDLFSAVIPPQSISMRCAATELRQAISEGRATYLGWIVSGDELHIPVETFTTHKIGSFLKDYPNTTRWRICGYDSETMLILKPRILSAEGLNNSSDIAEYVIKNKGWRVAINKLAKVHPTVVRRDALGRPRHSSRSNLPVTWSIE

SEQ ID NO: 806 - protein, 1144 aa, Actinomyces sp.
MSMIDSSENVPGIRYRVGIDVGLKSIGFCAVEVDRNDQPVRMLNSMVFIHDAGVDPNENKAAKSRKLTAGVARRTRRLYRTRHQRLVNLDRVLSKEFGWPLPDLTSFKDPREPWHVRAGLLEGYIADDEKRKEALSIALRHIARHRGWRNPYAKVETLLQPSEPSDFLKGLNDRISEELGRAFPADATPGQLVDTYLAHPDYVGRAGTPKLRGPQGILAGKLHQSDNAQEIRGICDVQRIEPAERDRLIRVVFEAKSPKGSAKERGLVGYDELPGQGRHVRAEKAHPAFQLFRMVSVLANLRIREGREERPLTPDELEDLVDFINQVSLKQEVTWQDLADKLRIERADLRGTAKASFDGSPVLRNPPTDVTTEKIMACKVKWLKEWWKEADDEQRGYMVDAFSNSGGSEDGTDVNDEVAELLEQATEDDQLEFEKISLPQGRAAYSLDSLRRLTDRMLRDGVDLHTARRLEFNVGDDWKPAVEPIGAPTGNPAVDRVLKQVSRWLHAATERWGEPTVINIEHARDGLGSERVARELMRENEKRRKANASAVAEMAAKLKLSGKVHRSDQIRYFALQRQNCQCLYCGAPITYTTAEMDHIVPRADGSSTNDRSNLAAVCRTCNHMKGKIPFAVWASSDKANQGVSLTGALERVNMWQRDSGMSPRQLKQLQREVCARLKSKKPDQEFDGRSMESVAWMAVELRTRIEGFYRSRDEESVPSVGVYRGQLTAEARRASGFESRVNLIGGRGKTRFDRRHHAMDALVIALMNPSVSRTLALRLNMRDAQRLTGVEETWKHFYGKPGEASKRFESWRESMLRGVELFNIALSDNAIPFVENIRLRVGSSVIHDATVHSFCPPKTPDGKQIITKGYGEQHSLGSAMPVELIDRAETPALWTALTRCPDFDPKKGLPENPQRTISVNGTRVGPTELVNFFEFSKSGPKACLKVRGGYVDLSGAIHHARIYRIAGKKTAYAMIRVFQVDLLRLKDHDVFTTPLKPSTISMRTAEPKIREALANGTATQIGWLVEGDELVIDTSKYSGGFIGEVLARYPEATSWRVAGFMTPAKLRIKPILLSKEGFVDETQAALLGVEVTSEAIQKTVDRPGWLPAVNVLFGAGGVRVIRRNCLGEERYHSSASLPVSMTLE

SEQ ID NO: 807 - protein, 1103 aa, Actinomyces sp.
MTKINDDLRYRVGIDVGLKSIGFCAVEVDENDQPLRLLNSMVFVHDAGVDPNENKAAKSRKLTAGVARRTQRGTAQNRRRLAELDRALSEELNWPLPNLEDFEDSYEPWHTRAELVEHYIKDDAERAEALAIAIRHIARHRGWRNPYLSVDSLLTPQEPSKFLRGLNERVTQALGREFPADATPGQLICAYIDSPKYAETQGIRGDSGILSGKLHQFDNVGEIRKICEVQRLDHDVFKLLVRKVFFAKSPRGSAAGLVGHDQIPGQGKYIRAEKAHPDFQLFRIVAVLTNLRIREGKAERCLTPDELRGLVDYILEVQLKQQVTWADLADNLGIERTDLRGTARASFDGSPALRFPPTDVTAEKIMASKVKWLKDWWDKADSERRGFMVDALSNSGGSTGDNDIDDEVAALLEAATEDEQAELEKIQLPQGRAAYSLDSLRRLTKRMLEEGVDLHTARKEEFNVDDDWRPEPEPIEAPVGNPAVDRVLKQVARWLNMATDRWGVPDVINIEHTRDGLGSEKVARELLRESQKRQDLNQKDMDKMIRELGISGKARRSSLIKYQAIQRQNSMCLYCGTEIGFETAEMDHIVPRALSGSTNDRSNLAAVCRACNHQKGAVPFAVWATSGEAHAGVSLEDAIKRVRLWQKGPGMSPKQHKAFQNEVISRLKSRKPDEEFDGRSMESVAWMAVELRTRIDGYYRKVNSDSVPKVGIYRGQLTAEARKASGFENRVNLIGGKGKTRFDRRHHAMDALVIAMMNQSVSQTLALRVNMRESQRITGQEETWKNFYGKPGQASERFEKWREGMLRAVELFNIELAKNAIPFHENVRLRVGSSKVHDDTVRKFIHAKLGEALSVAMIDCAETPALWTALTRLPDFDPKDGLPEDLSREIYIHSRKITADEQLNFFNSPSACLKVRGGYVEIGSSIHHARVYRIDGKKTTYSMVRVFATDLVKMTHEDVFTTPLKPSTISMRTADPKIRKALADGTATQIGWLVEGDELQLETDKYSGGLIGEVLAEYPQLTSWRVAGFYGVTQLRLRPYMLAAEGIPSDASESLRKVIEGKGWLPAINALLSSGCVKVVRRNCLGEPRFNAKSSLPVSQLLR

SEQ ID NO: 808 - protein, 1114 aa, Actinomyces turicensis
MQFHFYMVYVTMKGMNDKDASQQLRYRVGIDVGTHSIGFCAVEVDESGMPIQLLNSMVHKHDSGIDPGGNDTATTRLAEAGVARRTRRLIRRRKKRLQELDAFIEECGWPLVDLATITDARSPWRIRAHLATEHIDDEAEQGKLLSIALRHMARHRGWRSPYARISSLHIQADPSEQLKALAQRVSEKTGISLTADQTPAQLISVYLDVFETGKLRGPEGILGGKLMQSDNANELRRIATVQGLDNDLLKKIIGFVFAAESPKGSAAKRVGKDVLPGAHGLRAEKAHPAFQQFRIVSIVQNLRIKEGTGLRALTSEETEIVVDFLNQAGLTEAPTWEEVADNLEIPRSHLKGTATEGFDGIAPSTRPPFDVTSQKILNGKLKKLSAWWKDADYDHRCAMVNALSNVGSDDEGSLADDDVREFLSDFTDEELEALDKVELPGGRAAYSVDSLEKLTNTMLSEGCDLHSARKIAFGVDDSWTPPAEPIGQPVGNPAVDRVLKQVARWISAATNQWGTPESVNIEHVRDALGSEKASREYQRSLQTRRIRNEKLFAEMRERLDIGGKPRRSELTRYLALQRQNCQCLYCGMPITYTDAEMDHIVPRKGAASTNTRENFAAVCRACNHQKSNLPFAVWAEKTERPGVSVKEAYKRVSDMRIEPGMNGRQMNEFRKAIRLRLTTKHADAEIDGRSLESVAWMANELRHRIEGFYRSAENDVTVRVFRGAVTAEGRRASGFESRVNLIGGKGKTRLDRRHHAMDALTIALMEPGIAQTIALRMNMRESQRVLGEQETWKSFTGGSDTARKRWEHWCEEMLRASELFNVFLAEDRIPICQNKRLRLGSSAVHKAIVQPFEASDKRIVSDAMPVELIDRASTPALWTALTRDPDFDPKEGLPANPSRTIRLHDKRLGPNETVEFFPTAAACLAIRGGYCEIGAGIHHARIFRISGKKTTYAMLRVYQCDLVRFQKENLLTVELPANTISVRTAVPKLREALAHGTAEQIGWLVVGDELKIDLSGFTTGQIETFNETYPQATRWEVTGFPTKTQLRLKPLLIASEGLADDVPDDIVKIVKGPGWWPAIDKLLKIGNVVLYRRDTHGKPRVVSHRSLPLSSKLQ

SEQ ID NO: 809 - protein, 1113 aa, Alcanivorax sp.
MRYRVGLDLGTASVGAAVFSMDEQGNPMELIWHYERLFSEPLVPDMGQLKPKKAARRLARQQRRQIDRRASRLRRIAIVSRRLGIAPGRNDSGVHGNDVPTLRAMAVNERIELGQLRAVLLRMGKKRGYGGTFKAVRKVGEAGEVASGASRLEEEMVALASVQNKDSVTVGEYLAARVEHGLPSKLKVAANNEYYAPEYALFRQYLGLPAIKGRPDCLPNMYALRHQIEHEFERIWATQSQFHDVMKDHGVKEEIRNAIFFQRPLKSPADKVGRCSLQTNLPRAPRAQIAAQNFRIEKQMADLRWGMGRRAEMLNDHQKAVIRELLNQQKELSFRKIYKELERAGCPGPEGKGLNMDRAALGGRDDLSGNTTLAAWRKLGLEDRWQELDEVTQIQVINFLADLGSPEQLDTDDWSCRFMGKNGRPRNFSDEFVAFMNELRMTDGFDRLSKMGFEGGRSSYSIKALKALTEWMIAPHWRETPETHRVDEEAAIRECYPESLATPAQGGRQSKLEPPPLTGNEVVDVALRQVRHTINMMIDDLGSVPAQIVVEMAREMKGGVTRRNDIEKQNKRFASERKKAAQSIEENGKTPTPARILRYQLWIEQGHQCPYCESNISLEQALSGAYTNFEHILPRTLTQIGRKRSELVLAHRECNDEKGNRTPYQAFGHDDRRWRIVEQRANALPKKSSRKTRLLLLKDFEGEALTDESIDEFADRQLHESSWLAKVTTQWLSSLGSDVYVSRGSLTAELRRRWGLDTVIPQVRFESGMPVVDEEGAEITPEEFEKFRLQWEGHRVTREMRTDRRPDKRIDHRHHLVDAIVTALTSRSLYQQYAKAWKVADEKQRHGRVDVKVELPMPILTIRDIALEAVRSVRISHKPDRYPDGRFFEATAYGIAQRLDERSGEKVDWLVSRKSLTDLAPEKKSIDVDKVRANISRIVGEAIRLHISNIFEKRVSKGMTPQQALREPIEFQGNILRKVRCFYSKADDCVRIEHSSRRGHHYKMLLNDGFAYMEVPCKEGILYGVPNLVRPSEAVGIKRAPESGDFIRFYKGDTVKNIKTGRVYTIKQILGDGGGKLILTPVTETKPADLLSAKWGRLKVGGRNIHLLRLCAE

SEQ ID NO: 810 - protein, 1146 aa, Alicyclobacillus hesperidum
MAYRLGLDIGITSVGWAVVALEKDESGLKPVRIQDLGVRIFDKAEDSKTGASLALPRREARSARRRTRRRRHRLWRVKRLLEQHGILSMEQIEALYAQRTSSPDVYALRVAGLDRCLIAEEIARVLIHIAHRRGFQSNRKSEIKDSDAGKLLKAVQENENLMQSKGYRTVAEMLVSEATKTDAEGKLVHGKKHGYVSNVRNKAGEYRHTVSRQAIVDEVRKIFAAQRALGNDVMSEELEDSYLKILCSQRNFDDGPGGDSPYGHGSVSPDGVRQSIYERMVGSCTFETGEKRAPRSSYSFERFQLLTKVVNLRIYRQQEDGGRYPCELTQTERARVIDCAYEQTKITYGKLRKLLDMKDTESFAGLTYGLNRSRNKTEDTVFVEMKFYHEVRKALQRAGVFIQDLSIETLDQIGWILSVWKSDDNRRKKLSTLGLSDNVIEELLPLNGSKFGHLSLKAIRKILPFLEDGYSYDVACELAGYQFQGKTEYVKQRLLPPLGEGEVTNPVVRRALSQAIKVVNAVIRKHGSPESIHIELARELSKNLDERRKIEKAQKENQKNNEQIKDEIREILGSAHVTGRDIVKYKLFKQQQEFCMYSGEKLDVTRLFEPGYAEVDHIIPYGISFDDSYDNKVLVKTEQNRQKGNRTPLEYLRDKPEQKAKFIALVESIPLSQKKKNHLLMDKRAIDLEQEGFRERNLSDTRYITRALMNHIQAWLLFDETASTRSKRVVCVNGAVTAYMRARWGLTKDRDAGDKHHAADAVVVACIGDSLIQRVTKYDKFKRNALADRNRYVQQVSKSEGITQYVDKETGEVFTWESFDERKFLPNEPLEPWPFFRDELLARLSDDPSKNIRAIGLLTYSETEQIDPIFVSRMPTRKVTGAAHKETIRSPRIVKVDDNKGTEIQVVVSKVALTELKLTKDGEIKDYFRPEDDPRLYNTLRERLVQFGGDAKAAFKEPVYKISKDGSVRTPVRKVKIQEKLTLGVPVHGGRGIAENGGMVRIDVFAKGGKYYFVPIYVADVLKRELPNRLATAHKPYSEWRVVDDSYQFKFSLYPNDAVMIKPSREVDITYKDRKEPVGCRIMYFVSANIASASISLRTHDNSGELEGLGIQGLEVFEKYVVGPLGDTHPVYKERRMPFRVERKMN

SEQ ID NO: 811 - protein, 1552 aa, Anaerophaga sp.
MFSQRNNPYCELLQNVKQLYKEKFGKTNQVDNSIIYGFMKRILGLDLGTNSIGWALVENDENDRKGKIIGMGSRIIPMDMSELDNFNKGASISKTAERTRLRMTRRLRERHLLRRARLHRILNIMGFLPEHYRNSIDFIDKKGCFFEGQEPKIAYKPDKNSEQFCFLFTSSFHEMLEDFRKFQPELIQNRKKVPYDWTIYYLRKKALTQKISKEELAWIILNFNTKRGYYHLRGEDEDNQDNKKIKEFRALKVVNVTEREGANSSGKKWYDMELENGWVYSRQSNLPPNLEGKTIELIVSYTLDNNGNIKKDKNGKEKYSLSMPGEEDWNLVKIKTENDLKTSKKSVGEYIYDHLLKNPDQKIRGKLISTIERKFYKEELSRILKTQMNFYEELKNRELYQKCVEELYPNNKSHQQTLLQKDFIHLIVEDIIFYQRPLKSKRAFVNNCPLEYRVYVDKKSGELIKSGVKCIPKSHPLFQEFRLWQYVRNLRIYERERMVNGRLMVNVDVTNELLPDEEHIVRLFDLLNDRKSFKQDDVLRFVGIKSPKDRKRYSWNYPEDKELPGNETRHLILAWLKKVDGVPEDWLDPEKLKALWHLLYSVTDREEIIKGLHSFAKKYELPDTFVEHFKKIPRLEREYGSFSEKAIKKLLPLMRMGKYWKAEEIPADLLEKAQKIIDAEADDRISDEVREKLLHLKDISQLKGLPLWQASYLVYGRHSETGEVVKWRTSEDLEKYILQFKQHSLRNPVVEQVILEALRVVKDIWEHYGEGKEGFFNEIHVEIGRELKNPADKRKKITSQIQENENTNLRIKALLEELFNDPSVKNVRPYSPAQQEILRIYEDGVLNGQKEIPDDILKISKMARPSKSQLVKYKLWLEQKYRSPYTGEIIPLSQLFTSAYEIEHIIPQARYFDDSFSNKVICEAEVNREKGHQLAFEFITKRGGDEIELNFGKKVTILNVEEYQKFVKDHYGRSLRSLSKMRKLLMEDIPDDFIDRQLNDSRYISKVVRNLLSNIVRAEDENSLVSKHLITCTGGVTTRLKHEWGLNDVWNELITPRFVRLNKMGKEKFGEWINKKGKQVFQIQMPLELQKGFNKKRIDHRHHALDALVVACASRSHVNYLNNDSARANASETRYDLRNKLCYKDKTDSNGNYRWKFYKPWESFTEEAKNRLAGTVVSFKSNRRIMTRSSNRYFKWVDTSEGKKKKLVRQIKGDNQAIRKPLHKDTVLGKVSLRKEKKVSLSKAIDLWESIVDKPLKKRIQSLREQGYDKKLLLKYFKDRNNQFNGQDISRVNIYFFDNNLAARRVTLDASFNSEKRIDGITDSGIKKILYAHLQNEKYHGKKDEKGNEISPYELAFSPEGLEEMNANIKKLNGGKPHCPIYKVRLAETIGEKFKLGEKGNKNKKYVEAAKGTNLFFAVYVDEKGVRSFETIPFSVALERRKQKLAVVPEENENKEKLLFYLSPNDLVYVPDEDEKLIDYRQLSINPTRIYKMVSSSGTQCFFIPHFVASPIVQTMELGPNNKSERAWDGQMIKNVCYKLSVDRLGNVKIEK

SEQ ID NO: 812 - protein, 1515 aa, Anaerophaga thermohalophila
MKRILGLDLGTNSIGWALVESDEEQKSGKIQGIGSRIIPMDQNELDNFNKGNTVSQTAERTRLRMVRRLRERHLLRRERLHRVLKEIGFLPEHYLEQIDFTEKPGGFLPGKEPKIAYKPDNFKDKYDFLFQDSYHEMLSDFQDKNPEFIQKRKKVPQDWTIYYLRKKALTAKITKEELAWIILNFNQKRGYYQLRGEDEDVAKNTKKEEFHALKVVKVKEREDSEGASGKWYDIELENGWVYPRQSNIRPDWEGKILELIVTYNLDKDGNIKTDKEGNEKRSFRMPNKDDWTLRKKRTENEIEKSGKTVGEYIYDNLLDAPDLKIRGKLVSTIERKYYRSELEQILTAQKKYHPELSNSELFNKCISNLYPNNDIHRKALLSKDFVHLIINDIIFYQRPLKSKRSTVSNCPLEYRVYVDKVTGEKKKVPLKCIPKSHPLYQEFRLWQYVKNLRLFEKERFENGRLLTNVDVTEQFLPDEDKYVELFEFLNGRKTFKQDDILKFAGIKSAKDRVKYYWNYPQEKEYPGNETRYLIESRLKKIENVPDEWLNYEKIEELWHLLYSVTDKVEIEKGLQSFAAKYQLPDLFVEVFKGFPRMEREYGAFSKKAIKKLLPLMRMGKYWKLENINPDLIEKVQKIIDGEADDNINDGIRERFSEINEMSDLRGMPLWKASYLVYGRHSEAAEVIRWRTSADLDQYIKDFKQHALRNPIVEQVVLEALRVVKDVWNYFGEGREKFFDEIHVEIGRDLKNPADKRQKIANQIQENENTNLRIKALLVELFNDPEVQNVRPYSPVQQQLLKIYEDGVLNAERDIPDDIQKISRMANPTRNQLIRYKLWLEQKYRSPYTGEIIPLNKLFTSEYEVEHIIPRARYFDDSFSNKIISEAEVNRKKDRMLAFEFIKKLGGSTIDLNYGKKVSVLTVEEYQQFVKDHYGINPHSRLKMQKLLMDEIPESFIERQLNDSRYISKMVRNLLSNIVREENENSPVAKQLITCSGSITNTLKQEWGLNDVWNTIITPRFERLNKMGEQKYGEWVNKEGKPVFQIQMPLELQKGFNKKRIDHRHHALDALIVASATRSHVNYLSNEAAKTNAKDTRFDLRNRLCYKEKRGQNRNFTWRFYKPWNTFTEDAKNALNDIVVSFKSNHRVINKSTNRYFKWENLPGGMKKKRLVRQEKGDNWAIRQSLHKDTVLGKVSLRKVKPVSLSVALDSWNNIVDKALKKKIRSLKDQGYDKKLMLKYFKDRRNEYNGENISRVNVYYFDEEMAARRVDLDTSFNSEKRIEGITDSGIKKIIYAHLKNEKYHGQKDDKGKDISPYELAFSPEGIAEMNANIKQLNGGKPHCPIYKVRLAEPVGEKFQLGETGNKTEKLVEVAKGTNLFFGVYANDEGVRSFATVPFYLAVEREKQGLPAVPQENENGDQLLFWLSPNDLVYVPSEEDAHFANPKQIELDNSRIYKMVSSTGTQCFFIPHFVATPIVQTIELGPNNKSERAWDGQMIKKVCYKLSVDRLGNVEIE

SEQ ID NO: 813 - protein, 333 aa, Bacillus cereus
MMNPNNFTKEDFWRTIILYGLNQATYKIALGQSLIRFSEQQRNVVSMNELAEDFFDMYLERLKNGKPQLATPNRQTAMERIINSYNIGRLTRSQAIEKVEREAFNDVIDRFHTVDSLQVPMKFYEKTDKGIVIFDNVFEIFSDNNNFELRNELDARWDLLESAFEIKRTDSQLVNDIRKLYLANGYERTDITKNRSVLNGYQSNVCFYCGELMSDDDVHVDHVIPRQLINHDDIWNLVLSHGFCNQQKSDNLPDVNYIEKLIERNEYFIKSNHPISNKLKERLGNTPRRRRTTIDRIYEHAKLVLAPWKGIYGYNPATDPFYKTFIRNIVLSK

SEQ ID NO: 814 - protein, 1068 aa, Bacillus cereus
MRYVLGLDIGIASCGWAVINQEKERIEDLGVRIFDKAENPKDGKSLAAPRRDARSTRRTLRRKKHRMQRIKILLVKQGLLFKTELNHLYESATEFDVWNLRLDALERKLHPKEFARVLIHLAKRRGFKSNRKETTLSENGQILESISENQQIMEQQNYRTVGEMILKDKKFENHKRNKDGTYIGTVTRQQLQDEIQMIFHTQRLYKNDYATEEFESSYLEIWASQRPYASKDQIEKMIGYCTLEPKEKRTPKASWSFQYFVALQTINNLRLISKDKIEELSFEEKKQIMNLALEKPIVKYIDIRKLLSIPNDFQFNSLSYSADTVDTTLENKRCIELKEYHSINKVYKQVYGKNTPNLLPIDYDTIAYGLTIFKDDKDILEYLQNKYVNAKGKPIKNLAKKTYDDTFIQALLNLNFTKMGHLSFKALKNIIPFLEEGLSYDKACEKAGYNFKGTSYTERTKYLPVIPQNTNPVVHRALSQTRKVINAIIKKYGSPNAIHIETARELSKTFQERKEIDSRYQDNSKKNEHAIHKLKELGNINPSGINIVKFKLWSEQDGRCMYSGKYIEPHRLFEEGYTEVDHILPYSRSLDDSYNNKILTLGTENQRKGNKTPYEYMGNTSIWDEFETRVQSNKKINFKKQQKLLLQNFSYAREQEFIERNLNDTRYATIYLTSLIQQHLIFSESSSKKKVRTVSGIITSHLRSRWGFNKDRKEGHIHHALDAVIVAVTSNHMIQRVTKYYKLKELNKNLQAKQLPFPEPWEGFRLELEARISPNTQQYLKGIHFKNYADVNLSDIKPIFVSRMPKRSITGELHQETIRKFLGYNEKGKVLTAIKTKLEDIPFDANGDFPMYGKETDLYTYNAIKERYLSHEKDKRKSFQEPLYKPTKSGEIGPLIKSIKIMDTRTIVNPVNQGKGVVYNSKIARTDVFKKEDKYYLIPIYTIDLLKNILPHKAITAGKGYEDWTTIDSSFTFLFSLFPNDLIQIVPSKNKTIKARTTVSKKEILLPSLTGYFKGVHSGTAGITVETHDGSVIANVGSKQLLLFEKYQVDVLGHYTKIKEEKRMGMAI

SEQ ID NO: 815 - protein, 1078 aa, Bacillus cereus
MRYVLGLDIGIASCGWAVINQEKERIEDLGVRIFDKAENPKDGKSLAAPRRDARSTRRTLRRKKHRMQRIKVLLVKHGLLSKTELDHLYESATEVDVWNLRLDALERKLYPKEFARILIHLAKRRGFKSNRKETTLSENGQILESISENQQIMEKQNYRTVGEMILKDKKFENHKRNKNGTYVGTVTRQQLQDEIQMIFHAQRLYKNDYATEEFESSYLEIWASQRPYASKDQIEKMIGYCTLEPKEKRAPKASWSFQYFVALQTINNLRLISKDRIEELSFEEKKQIMNLALEKSIVKYIDIRKLLSVPNEFQFNSLSYSADTVDTAVESRKCIELKEYHSINKVYKQIYGENALNLLPKYYDTIAYGLTIFKDDKDILEYLQNKYVNAKGKPISNFANKTYDDTFIQALLNLNFTKMGHLSFKALKNIIPFLEEGLSYDKACEKAGYNFKGTSYTEQTKYLPVIPQNTNPVVHRALSQTRKVINAIIKKYGSPNAIHIETARELSKTFQERKEIDSMYQDNSKKNEHAIHKLKELGNINPSGINIVKFKLWNEQDGRCMYSGKYIEPHRLFEEGYTEVDHILPYSRSLDDSYNNKTLTLGTENQRKGNKIPYEYMGNTSIWNDFETRVQSNKKINKKKQQKLLLQHFSYAREQEFIERNLNDTRYATIYLSSLIQQHLIFSESSRKKKVHTVSGIITSHLRSRWGFNKDRKEGHIHHALDAVIVAVTSDHMIQRVTKYYKLKELNRNLQAKRMPFPEPWEGFRLELEARISPNTQQYLKGLRFKNYADVNLSEIKSIFVSRMPKHSITGELHQETIRKFIGYNEKGKVLTAIKTKLEDIPFDANGDFPMYGKESDLYTYNAIKERYLSHKKDKRKSFQEPLYKPTKSGGIGPLIKSIKIMDTRTIVNPVNQGKGVVYNSKIARTDVFKKEEKYYLIPIYTIDLMKNILPQKAITAGKGYEDWTTIDPSFTFLFSLFPNDLIQIVPSKNKTIKARTTVSKKEVLLPSLTGYFKGVHSGTAGITVETHDGSVIANVGSKQLLLIEKYQVDVLGNYTKIKEEKRIGLTTYNDNKKIAAC

SEQ ID NO: 816 - protein, 1088 aa, Bacillus smithii
MNYKMGLDIGIASVGWAVINLDLKRIEDLGVRIFDKAEHPQNGESLALPRRIARSARRRLRRRKHRLERIRRLLVSENVLTKEEMNLLFKQKKQIDVWQLRVDALERKLNNDELARVLLHLAKRRGFKSNRKSERNSKESSEFLKNIEENQSILAQYRSVGEMIVKDSKFAYHKRNKLDSYSNMIARDDLEREIKLIFEKQREFNNPVCTERLEEKYLNIWSSQRPFASKEDIEKKVGFCTFEPKEKRAPKATYTFQSFIVWEHINKLRLVSPDETRALTEIERNLLYKQAFSKNKMTYYDIRKLLNLSDDIHFKGLLYDPKSSLKQIENIRFLELDSYHKIRKCIENVYGKDGIRMFNETDIDTFGYALTIFKDDEDIVAYLQNEYITKNGKRVSNLANKVYDKSLIDELLNLSFSKFAHLSMKAIRNILPYMEQGEIYSKACELAGYNFTGPKKKEKALLLPVIPNIANPVVMRALTQSRKVVNAIIKKYGSPVSIHIELARDLSHSFDERKKIQKDQTENRKKNETAIKQLIEYELTKNPTGLDIVKFKLWSEQQGRCMYSLKPIELERLLEPGYVEVDHILPYSRSLDDSYANKVLVLTKENREKGNHTPVEYLGLGSERWKKFEKFVLANKQFSKKKKQNLLRLRYEETEEKEFKERNLNDTRYISKFFANFIKEHLKFADGDGGQKVYTINGKITAHLRSRWDFNKNREESDLHHAVDAVIVACATQGMIKKITEFYKAREQNKESAKKKEPIFPQPWPHFADELKARLSKFPQESIEAFALGNYDRKKLESLRPVFVSRMPKRSVTGAAHQETLRRCVGIDEQSGKIQTAVKTKLSDIKLDKDGHFPMYQKESDPRTYEAIRQRLLEHNNDPKKAFQEPLYKPKKNGEPGPVIRTVKIIDTKNKVVHLDGSKTVAYNSNIVRTDVFEKDGKYYCVPVYTMDIMKGTLPNKAIEANKPYSEWKEMTEEYTFQFSLFPNDLVRIVLPREKTIKTSTNEEIIIKDIFAYYKTIDSATGGLELISHDRNFSLRGVGSKTLKRFEKYQVDVLGNIHKVKGEKRVGLAAPTNQKKGKTVDSLQSVSD

SEQ ID NO: 817 - protein, 1069 aa, Bacillus thuringiensis
MNYDIGLRIGITSCGWSIINKDLERIEDLGVRVFEKAENPDGTASAAPRREARKSRRKHRRKKHRIERIKRLIVQHDLLSKKELDSLYLSPFNIDVWNLRVEALERKLDNREFARVLIHLVQRRGFQTIRKSVEIQEEGKLLENVSENERIMKVNGYKTVGEMFSKHEKFTHHKRNKDGSYTSVVTRSLLLKEIKTIFNSQRILGNVFSTQKLESDYLYIWGSQRPTLTYEQLMSMVGNCIYEKKEKRAPKTSWAFQYFSLLQKINKLKVSDDNTLRKLSKEERDIVIELAFKKKNVSFVDIRKALKLNDNTKFNHLTYSHVVETKKVEKATFIELKGYHLIKKQLKDRNVELTQELQPKDYDAIAAASTFFKNDIEFRDYLRNQYLDSNGKRKSNIANKVFEDKVIAAVFELNFSKVCHLSFKSLYKLIPHLEKGLDYKEAILCAGYNFRDENKRDKKLFLPVIQQETNPVVHRALTQARKVINAIIREYGSPNTIRFVVANDLAKTYKQRKELESTLKKNRAENEKIKTKLLSMGIINPTGMDIVKYKLWYEQSGICLYTGRQMELSSLFKPGYSIVNHIIPYNRSFDDTYHNRVLTLTETKYEKGNKIPFEYFGAEETCWNEYEKRVSTSKKIHDKKREKLLIRNFDIEYENEMISNNVFDTHYIGSYFEKYIDEHLQFKKSTKKQKVFSIHGNMVAHLHSRWGFNKNSREIYLNHAVDAAIVAVLTDQLIRNIADYYRRDNILEQKGSLKFPEPWKSFSIELEARISPQVRDLIKKLNLDSYLDVDILHIKPVFISKKPRRKVNGEAHKSTIRSLIGINEIGKTVTCIKTRLEDIPFDENGDFPMYGKDTDKYTYTAIKERYLEFNKDKEKAFSTPLYKLKRNGEPGNQIKSVKIIDTRNIVNKVNQGKGIAYNSNIIRVDVFSRDQKYYVVPIYLRDFIKGSLPNKIITAAKGFMQWPETDNSYTFLFSIFPNDLIKVVPKEGKFIKAKNENKENINLTEILGYFKGLDSSTGAFTLESHDGSLLARGIGTKNLLLIEKYQVDVLGRYNKVGNEERQDIKIQQN

SEQ ID NO: 818 - protein, 206 aa, Bacteroides cellulosilyticus
MKKILGLDLGCNSIGWALVNEAENTEEISSIIKLGVRVNPLTVDEMQNFEKGKSITTNADRTLKRSMRRNLQRYKLRRDTLIEVLKEHGFITDSTLLSEHGNKTTFETYRLRAKAAVEEISLEKFARVLLMINKKRGYKSSRKAKGSEDGVLIDGMDVARKLYEEGLTPGELCLQILEAGKKNLPDFYRSDLQNEFDRIWNFQKLV

SEQ ID NO: 819 - protein, 349 aa, Bacteroides coprosuis
MKKILGLDIGTNSVGWAVVNTNQEGEPSQIEKLGSRIIPMSQDILDKFGQGQTVSSTASRTDYRGIRRLRERSLLRRERLHRVLHILDFLPKHYADSIGWDPRNSKTYGKFLPGTEVKLAWVPTADGHQFLFYSTYLEMLEDLKQTQAQLFETSQTPVPLDWTIYYLRKKALTQPITKHELAWLLLHFNTKRGYYQRRGELEDTPTDKLVEYHALKVVDVEVDPEDQSKKPWYFVHLENGWIYKRQSSEPLDNWKGLVKEFIVTTHLDKEGKPKLDKEGEVRRSFSSPKEDDWTLVKKKTENDLEKSGLTVGAYIYQTLLNKPNQKIRGGLIKHIERNYYVEELEQILR

SEQ ID NO: 820 - protein, 1504 aa, Bacteroides coprosuis
MKKVLGLDIGTNSVGWAVVNQNDKGEFLSIEKIGSRIIPMSQDVMDKFGAGQTESSTAQRTQYRGVRRLRERSLLRRERLHRVLHILHFLPQHYDAAIGWNKKENKTYGKFLPGVEVNIPWVATDQGHQFIFMDSYAEMLKDLKQHQPHLFEKSSTPVPLDWTIYYLRKKALTQAISKEELAWILLNFNQKRGYYQLRGEEVEDNTKREEFYALKVVKVELDKDNTSAKTWYKVHLENGFIYPCPSDTPIDSWVGMVKDFIVTTTLEKDGSEKRTADGEIKRSFRAPKEDDWTLLKKKTESELEKSGKQVGAFIYDTLLSNPDQKIIGGLIKTIERKYYKKELEQILETQQKFIAELSDKKLFQACAEELYPLNDSHRENLLERDFKHLFVQDIIFYHRPLKTKKSLISNCTYEYRTFYKNGEKQISPIKCIAKSNPLFQEFRVWQFVQNLRILQRQRSEGDSIKYNVDVTAEFLKDENDIANLFTWLNERKVIKQDQLLKSYFKLKVNKETKELDYRWNYVDDKNKEYPCNATRTHILSFLEKCKEEKRIEDDRFVYSLWHLLYSVVEPIELRGALAKFAEREHLHPSFVDVFAQFPPLEKEYGSYSEKAIKRLLPLMRMGDYWHEDKIDVKTKQRIQRIIDGEADDDITHRSREKVENLRSITDFKGLPLWKAGYVVYNRHSESGELTKWKTPHELSNYIQNEFKQYSLRNPIVEQIVLETLRVVHDLWVKHGDFSEIHLELGRDIKNSSDKRKRMAERQQENENSRQRVLEMLIDLKKEAAFADLNPYSPSQQEKLRIVEDGVLRSNIEIPKDIEKITKSAKPTSRELTKYRLWLDQKYRSPYTGQPISLAQLFTSKYEIEHVIPQAKYFDDSFTNKVICESEVNKEKGSMLAHEFILKNGGSTVNVGGRQVQVLKNDAYVELINRLYGKNNPVKAKKLLAEDIDEVVGDFSERQLNDTRYISRVVQKLLSNIVREEDEQESTSKHVIGCSGQVTTALKKDWGLNDIWNKIIQPRFERLNEMTATEDYGVWQSPNHFQIRVPEEIQKGFTKKRIDHRHHAMDALVIACATRSHINYISNRSGQDRNAKFETTRTDLRSKLCYKENSSGNNYNYIFNKPWDTFTQDAHRALENIVVSHKQNLRVLTKTNNYTQFINKDGKKDLQKQVKGDHFAVRKPMHQETIYGRVSIRSIKEVALKKALENWKQIVDRTLKDKIRELIGAYGKYDAQTILKYFKDRDYKFNNLKINRVEVYEYDHNCAAVRKSIGDDLTIKQIERITDESIRKILMNHLSNYDDNLKEAFSPEGLMEMNKNIKELNGGKNHQPIYKVRLFEDLGSKFPLGVSHNNPDKYAIAAKGTNLFFGIYEDQEGKRMFDSIPLNIVIDRLKEKKSPVPETYNESKLKFHLSPNDLVYVPTDEEQKQPELVDVDHLSDEQKGRVYKAVSFTGNRAFFVNHRVSKVIHDYVEFGTKNKIENDDDKRSLKHICWKLKVNRLGEITDVKR

SEQ ID NO: 821 - protein, 1509 aa, Bacteroides eggerthii
MKTILGLDLGTNSVGWAVINSVIKEQAERIWIEMAGSRIIPMDAAVLGDFDKGNSISQTSERTRLRGARRLRERQLLRRERLHKVLNILGFLPNHYLEYIDFEKHPGKFLADAEPKLAWVKDEQGKYTFLFQAAFDEMLADFAIHQPSLVSGDKKIPYDWTIYYLRKKALTEMISKEELAWILLNFNQKRGYYQLRGEEEEDNAGKSVEFYALKVLTVEATDEKKGRDVWYNVHLENGWIYRRSSSVPLDWEGQVKEFIVTTDLNPDGTPKLDKYGEVKRSFRAPKEDDWMLIKKRTEADIANTHKTVGAYIYDTLLQKPQQKIIGKLVKTVERKLYRDELSLILQKQCAFHAELQDRALYARCVEALYPSNEVRRKNIANRDFVYLLMDDILFYQRPLKTKKSLIANCPYEENEYVDRETGEIKKTPLKCIAKSHPLFQEFRLWNFLSNIRIYQKEKEINGTLHLDVDVTAEFLKTEDDYVALFDWLNSRKEIEQKTFLKYPKFGLKKEISNYRWNYVEDKQYPCNETRHAILSSLEKANVCIDFLSNEKEVALWHILYSVSDKQEIEKALRTFAAKNGLDESFVEAFKKFPPFKSEYGAYSAKAIKKMLPLMRCGKYWDVSSIDDTTKERIKKIVTGEYDERISVKVRDKVMNLSDISCFRRLPLWLACYIVYNRHSEDKEAVKWESPADIDAYLASFKQHSLRNPIVEQVITETLRVVRDIWKQVGRIDEIHIELGREMKNPADKRKRMTAQILENENANLRIKALLAEFMNPEYEIENVRPYSPSQQEILRIYEDTVLHAEDQLPEEIDAILKKFNSSKVPTKSEFLRYKLWLEQKYRSPYTGELIPLGKLFTAAYEIEHVIPQSRYFDDSFSNKVICESAVNKLKDNQLGYEFIKNHHGQKVEVGFGKSVEIFSVDSYERFVKEQYAKSAVKMKKLLMDDIPEQFIERQLNDSRYISKVIKGLLSNIVREKNDSGEYEPEAVSKNIVVCTGSVTDRLKRDWGMNDVWNSIVYPRFERLNSLTDTQSFGHWENKSGKKVFQTELPLEYQKGFSKKRIDHRHHAMDAIVIACATRNHVNYLSNESASRNAKISRYDLQRLLCDKNRTDDNGNYKWVIKKPWDTFTQDAREVLSKIVVSLKQNLRIINKTTNVYRHLDATGNRVYEKQKTGDSWAIRKPMHKDTVFGAVNLRKVKVVRLSVALDTPAMIVDKRVKNKVFELLSYKYDKKRIEKYFKENAFLWKELDLAKVAVYYFTEATTEPLVAVRKPLDSTFNEKKIKESVTDTGIQKILLNHLCTKEGKPDLAFSAEGIEEMNRNLLQLNNGKSHQPIYKVRVYEPRGNKFSVGVLGNKGTKWVEAAKGTNLFFAIYITEDGKRTYETIPLNVVIEREKQGLVPVPDRNKKGDKLLFWLSPNDLVYLPTEEEREFGRINEPIDRGRIYKMVSCTGNEGHFIPANVANPIVPVIELGSNNKAQRAWTNEMIKDICIPIKVDRLGHIIEVKYRIDE

SEQ ID NO: 822 - protein, 1526 aa, Bacteroides faecis
MKKILGLDLGTNSIGWAVLNAADDNSLKYIEAAGSRIIPMDAAILGDFDRGNSISQTAERTRIRGMRHLRERYLLRRARLHRILNLLGFLPFHYAQDIDRYGNFSADMEPKIAWCKNLEGELEFIFIESFNEMLEDFRKNQPELVADNKKVPYDWVIYYLRKKALEKKISKEELAWILLNFNQKRGYYQLRGEDDDESMKTAKTRQYFDKQIIKNIIDTNQTYKGQRILIVELQNGDKGKIFKKEIPDWIGQEKNIIVTVDIDKDGNDKYEESGSLSCRFKIPTDAEWESEWKLIKMKTQKDLDESNKTVGTYIYDSILQNPTQKVRGKLVRTIERKYYKAELKQILEKQTEFHSELQDKDLYIECLNELYSNNDTHRNAITDRDFVYLFMNDILFYQRPLKSKKSLIDNCPYERNIYIDKETGEIKYSPIKCIAKSHPLFQEFRLWKFISSIRIYQRESVVEVVDKQLDLFSSQSTSVQKLVTDVDVTDKFLTCENDYVALFEWLNKKKIIDQKEFLKYRPFGLKGDIDNYRWNYVEDKSYPCNETHAMILTYFAKAGISEDILTKEMEEALWHILYSVEDRQEITKALRTFASKYHLSDSFVKVFSNIPPFKKEYGSYSAKAIKKLLSLMRMGKYWSEDAIDVNTRERIDKIVTGEYDEKIRDRVREKTIRLNDIRHFRALPDWLACYVVYDRHSETREITEWKSPEEIDEYIRNFKQHSLRNPIVEQVITETLRTVRDIWKQVGCIDEIHVELGREMKNPADKRKRITSQIIENENANLRVKALLTEFVNSEFEIENVRPYSLSQQDILRIYEDGVLNSVAEVPGDIAGILKKFNENDAKKRPTTSEILRYKLWLEQKYRSPYTGEMIPLSKLFTSAYEIEHVIPQSRYFDDSFSNKVICEAEVNKLKDNALGYEFIKKHHGEKVELGFGKIVEIFSVSVYEQFVKDNYSRNRGKMKKLLMDEIPEQFIERQLNDSRYISKVVKTLLSNVVREKAEQEAVSKNVIVCTGGVTDRLKKDWGINDVWNKIVLPRFLRLNELTNSTNFTAKNAAGNEIPAMPLELQKGFNKKRIDHRHHAMDAIVIACANRNIVNYLNNESASRKAKISRHDLQAILCDKVRTDDKGNYQWRVKKPWDTFTQDVYVALENIIVSFKQNLRVINKTSNYYWHYENGKKVLVKQVKGDSWAIRKPMHKDTVFGEVNLRKVKSVSLNEALKNPQFIVEKDLKRQLLSLLQQNFDIKKIKKYFEEHKDIWSDISLSKMNIYYFTKETKDRYFATRKPLDASFDKKKIESCITDTGIQQILLRHLELKENDPERAFSPDGIDEMNRNIIQLNKGKGHHPIAKVRVYEKADKFEVGQRGNKSSKFVEAAKGTNLFFAVYETEYPDEKTNSIVRKRNYATIPLNIAIERQKRGLSTAPEDEKGNVPSFVLSPNDLVYLPTSEDIVNGHITQPIDKSRIYKMVSSSGSQCFFIKHNIANIIVDKYEFSPLNKMERAISNEMIKEICIPVKVDRLGNIVKLGKSE

SEQ ID NO: 823 - protein, 1509 aa, Bacteroides fluxus
MKTILGLDLGTNSVGWAVINSVIKEQAERIWIEMAGSRIIPMDAAVLGDFDKGNSISQTSERTRLRGVRRLRERQLLRRERLHKVLNILGFLPNHYLEYIDFEKHPGKFLSDAEPKLPWVKDEQGKYTFLFQAAFDEMLADFAIHQPSLVSGDKKIPYDWTIYYLRKKALTEMISKEELAWILLNFNQKRGYYQLRGEEEEDNAGKSVEFYALKVLTVEATDEKKGRDVWYNVHLENGWIYRRSSSVPLDWEGQIKEFIVTTDLNPDSTPKLDKYGEVKRSFRAPKEDDWMLIKKRTEADIANTHKTVGAYIYDTLLQKPQQKIIGKLVKTVERKLYRDELSLILQKQCAFHAELQDRTLYARCVEALYPNNEVQRRNIANRDFVYLLMDDVLFYQRPLKTKKSLIANCPYEENEYVDRETGEIKKAPLKCIAKSHPLFQEFRLWNFLSNIRIYQKEKEINGTLHLDVDVTAEFLKTEDDYVALFDWLNSRKEIEQKTFLKYPKFGLKKEISNYRWNYVEDKQYPCNETRHAILSRLEKANVCIDFLSNEKEVALWHILYSVSDKQEIEKALRTFAAKNGLDESFVEAFKKFPPFKSEYGAYSAKAIKKLLPLMRCGKYWDVSSIDDTTKERIKKIVAGEYDERIAVKVRDKVMNLSDISCFKRLPLWLACYIVYNRHSEDKEAVKWESPADIDAYLASFKQHSLRNPIVEQVITETLRVVRDIWKQVGRIDEIHIELGREMKNPADKRKRMTAQILENENANLRIKALLAEFMNPEYEIENVRPYSPSQQEILRIYEDMVLHAEDQLPEEIDAILKKFNSSKVPTKSEFLRYKLWLEQKYRSPYTGELIPLGKLFTAAYEIEHVIPQSRYFDDSFSNKVICESAVNKLKDNQLGYEFIKNHHGQKVEVGFGKSVEIFSVDSYERFVKEQYAKSAVKMKKMLMDDIPEQFIERQLNDSRYISKVIKGLLSNIVREKNDSGEYEPEAVSKNIVVCTGSVTDRLKRDWGMNDVWNSIVYPRFERLNSLTDTQSFGHWENKSGKKVFQTELPLEYQKGFSKKRIDHRHHAMDAIVIACATRNHVNYLSNESASRNAKISRYDLQRLLCDKSRTDDNGNYKWVIKKPWDTFTQDAREVLSKIVVSLKQNLRIINKTTNVYRHLDATGNRVYEKQKTGDSWAIRKPMHKDTVFGAVNLRKVKVVRLSVALDAPTMIVDKRVKNKVFELLSYKYDKKRIEKYFKENAVLWKELDLARVAVYYFTEATTEPLVAVRKPLDSTFNEKKIKESVTDTGIQKILLNHLCTKEGKPDLAFSAEGIEEMNRNLLQLNNGKRHQPIYKVRVYEPRGNKFSVGVLGNKGTKWVEAAKGTNLFFAIYITEDGKRTYETIPLNMVIEREKQGLAPVPDKNEKGDKLLFWLSPNDLVYLPTEEELEFGRINEPIDRGRIYKMVSSSGNQCFFIPQSISNAIIPTKELGANNKAERSWDGAMIKNICIPVKVDRLGRIIEVKYRINE

SEQ ID NO: 824 - protein, 1436 aa, Bacteroides fragilis; identical to SEQ ID NO: 155

SEQ ID NO: 825 - protein, 1512 aa, Bacteroides nordii
MKNILGLDLGTNSIGWAVINSEEDGPIVKKRIELAGSRIIPMDAAVLGNFDSGVTKSQTAERTSFRSIRRLRERQLLRRERLHKVLQILGFLPEHYVNDIDFENHPGKIKRNTEPKLPWRKNSMGQFEFIFQDSFEAMLTDFATHQPVFVSEGKKVPYDWTLYYLRKKALTEGISKEELAWLILNFNQKRGYYQLRGEEEEEQSNKLVEFYALRVVKVEATDDKKGKDTWYNVHLENGWIYRRTSNIPLDWEGKVKEFIVTTDLNEDGTPKLDKYGEVKRSFRAPKEDDWTLIKKKTESDIANSHKTVGCYIYDALLQNPHQKIKGRLVRTVERKFYKEELRLILEKQLSFHPELQDRDLYRACIDALYVSNEAHKNNISGRDFVYLFIDDIIFYQRPLKTKKSLIDNCPYEENQYMDRETGEVKQAPIKCIAKSHPLFQEFRLWQFISNIRIYQRERVLDDGKLETDVDVTPDFLKTEDDYTTLFEWFNDRKEVDQKAFLKNPQFGLKKTFTEYRWNYVEDKSYPCNETRNAILNGLQKAGVSADFLSREVEEALWHILYSVEDKIEIESALRKFASKHDLDDRFADVFKKLPPFKKEYGAYSAKAIKKLLPLMRIGKYWELSNIDDKTKERIDKIITGEWDENIHDRVREKAIKLSDITDFKGLPLWLSCYVVYNRHSEARAIAKWESPEDIDSYLRLFRQHSLRNPIVEQVITETLRTVRDIWKRVGQIDEIHVELGREIKNPADKRAKMTAQIVENENTNLRIKALLAEFINSEYEIENVRPYSSNQQEKLKIYEDTVLNGVKEIPEDINTILKKFRESDLKKRPTKSDFLHYKLWLEQKYCSPYTGRIIPLGKLFTSAYEIEHIIPQAHYFDDSFSNKVICEAEVNGLKDKKLGYEFIKHNPGKMVEIGFGKPPVRIFSVEEYERFVKENYSGIKNKMNKLLMDDIPETFIERQLNDSRYISKVVKSLLSNIVREKDSNGEYEPEAISKNVIVCTGSVTDRLKRDWGVNDVWNSIIYPRFERLNELTGSQQFGCWENKEGKRVFQTAVPLEMQKGFSKKRIDHRHHAMDAIVIACATRNHINYLSNESASKKAKISRTDLQRLLCTKCRTDDNGNYKWIVKKPWPAFTQDIRKALENITVSFKQNLRVINKTTNYYVHFDESGKKVLEKQINGDSWAIRKPMHKDTVFGKVNLQKVKEVRLSLALDTPKMIVDKKLKEKVLQLYSYKYDKKRIDKYFKENASLWKDLNLSKVAVYYFTNDSTEPLVAVRKPLDTSFNAKKIKESVTDTGIQKILLNHLSNNQDDPNLAFSPDGIDKMNKNLTALNDGKYHQPIYKVRVCEPQGNKFSVGTSGNKTSKYVEAAKGTNLFFAVYQTEDGKRSYETIPLNVVIEREKLGWTPVPENNNNGDKLLFWLSPNDLVYVPTADELNNGMRLDNMDKGRIYKMISCSGPQCFFIPQNVSNAIIPVIELGANNKAEKSWNNEMIKVVCVPIRVDRLGCITQINNQK

SEQ ID NO: 826 - protein, 779 aa, Bacteroides oleiciplenus
MKEGNQYDVACEYAGYRHSKSSLTREEIDNKVLKNRLEILPKNSLRNPVVEKILNQMVNVVNAVIDTYGKPDEIRVELARELKKGAKEREELAKSIAQNTREHEAIRQLLQTEFGMMHVTRNDIIRYKLYEELKDNGYKTLYSDQYIPREKVFSKEIDIEHIIPQARLFDDSLSNKTLEYRAVNIEKGNKTAYDFVKEKYGNDGLRRYLNHCEALFKDKKTKLKKLKMEDQDIPDGFIDRDLRNTQYIAKKALSMLSEISRRVVATTGSITDELRKDWQLVDIMKELNLPKYEALGFVETFKDKDGRIIKKIKDWSKRNDHRHHAMDALTVAFTKDVFIQYFNNKNAFWMSGSKEHANITAIKNKYFEKGKALAPIPLELFRTEAKHHLENILVSIKAKNKVVTNNINRTKKKNGENLKLQQTPRGQLHLESIYGSYRQCIIRDEKVNASFDASKIANVSKSAYRNALLKRLEAYDNDPKKAFTGKNSLDKNPVYLDENKMEKVPDRVKIVEFETVYTIRKPIDPKLSIDKVVDARIRTLLKKRLEEYGGDAQRAFSNIEENPIWLNKEKGISVKRVAIRGISNAQALHDKKDKDGNPILDKEGKGIPTDFVNTSNNHHVAIYRKPVVDKMGQVILDENGSPRYELGEDVISFFEAVARVNLRQPVVDKDYKRSEGWQFLFSMKQNEYFVFPNEKTGFNPKEIDLLNPENYALISPNLFRVQKIGLNDYTFRHHLETSIQNNSNELKFITWIRCGKNGINGVIKVRVNHIGQIVSMGEY

SEQ ID NO: 827 - protein, 653 aa, Bacteroides oleiciplenus
MKKILGLDLGSSSIGWALVNEGANDEEKSSIIKLGVRVNPLTVDEAQNFEKGKSITTNADRTLKRGMRRNLQRYKQRREALVEVLKKHEFITAGTLMSEQGNKTTFETYRLRAKAVEEEISLEEFARVLLMINKKRGYKSSRKAKGDEDGVLIDGMDVAKKLYDEDLNPGELCLQLLEAGKKTLPDFYRSDLQDEFDKIWNFQKQFNPESFCDTAKEEVRGKNRTQTWTILSKYFVWTEGDSVWNNEEARTEERIKEYKLVGIKRTTKGYEQKLENYRWRVQALSEQLNPEIIAIVLQEINGQISASSGYLGAISDRSKELFFNHQTVGQSLMSELDKNPNGSLRNKVFYRQDYLDEFNTIWEKQSLYHKELTVELKKEIRDIIIFYQRRLKSQKGLISTCEFEQREIIVEKDGKRKTKIIGCKVIPRSHPLFQEFKIWQTLNDVEVYVADRRTKRKQDRKSTTLFSDTEDILLVEGKRYLYQEEKELLAKELFVRENMKKAEVLKLLFEDPKELDLNFKQIDGNRTGFALFSAYSKMIEKYGYESVNFKNSADEIIEKLQIIFADLGWNTELFSIDLSKDDKELEKQPYFRLWHLLYSFEGDNTPTGNGKLIEALMRLCSVEKEYASVLANVSFQEDYGSLSAKAIKKYYLI

SEQ ID NO: 828 - protein, 1436 aa, Bacteroides sp.
MKRILGLDLGTNSIGWALVDEAENKDERSSIVKLGVRVNPLTVDELTNFEKGKSITTNADRTLKRGMRRNLQRYKLRRETLMEVLKEHKLITEDTILSENGNRTTFETYRLRAKAATEKISLEEFARVLLMINKKRGYKSCRKAKGAEEGTLIDGMDIARELYNNNLTPGELCLQLLDAGKKYLPDFYRSDLQNELDRIWEKQKEYYPEILTEVLKEELRGKKRDAVWAICAKSFVWEEYYTEWNKEKGKTEQQEREHKLEGIYSKRKRDEAKRENLQWRVNGLKEKLSLEQLVIVLQEMNIQINNSSGYLGAISDRSKELYFNKQTVGQYQMEMLDKNPNASLRNMVFYRQDYLDEFNTLWEKQAEYHKELTGELKKEIRDIVIFYQRRLKSQKGLVGFCEFESRQIEVEIDGKKKIKTVGNRVIPRSSPLFQEFKIWQILNNIEVTVVGKKGKRRKQKDNSPTLFDGLDDTEQLELNGSRYLYQEEKELLAQELFVRDKMTKSDVLKLLFDNPQELDLNFKTIDGNKTGYTLFQAYSKMIEMSGHEPVDFKKTVEKVVEHVKAVFDLLNWNTDILGFNSNEELDNQSYYKLWHLLYSFEGDNTPTGNARLVQKITELYGFEKEYAIILANVTFQDDYGSLSAKAIHKILPHLKEGNRYDVACAYAGYKHSESSLTKEEIANKALKDRLTLLPKNNLRNPVVEKILNQMVNVINAIIDTYGKPDEIRVELARELKKNAKEREELTKFIAETTRKHEEFKILLQSEFGLTNVSRTDILRYKLYKELESCGYKTLYSNTYIPREKLFSKEFDIEHIIPQARLFDDSFSNKTLEARSINLEKGNKTAYDFVKEKFGESGADNSLDHYLNNIEDLFKSGKISKTKYNKLKMAEQDIPDGFINRDLRNTQYIAKKALSMLNEISRRVVATSGTITDKLRQDWQLVDVMKELNWEKYKALGLVEYFEDKDGRQIGRIKDWTKRNDHRHHAMDALTVAFTKDIFIQYFNNKNASLNSNTNEYAIKNKYFQNGRAIAPIPLREFRVEAKKHLENTLISIKAKNKVVTGNINKTKKRGGVNKYLQQTPRGQLHLETIYGSGKQYLTKEEKVNASFDMKKIATVSKSAYRDVLLKRLHENDNDPKKAFTGKNSLDKQPIWLDKEQTRKVPEKVKTVTLETIYTVRKEISPDLKVDKVIDAGVRKILTGRLNEYGNDAKKAFSNLDENPIWLNKEKGISIKRVTISGISNAQSLHVKKDKDGKPILDEDSRNIPVDFVNTGNNHHVAVYRRPVIDKRGQLVIDEAGNPKYELEEVVVSFFEAVTRANLGQPIIDKDYKTSEGWQFLFSMKQNEYFVFPNEKTGFNPKEIDLLDAENYGVISPNLFRVQKFAHKNYVFRHHLETTIKDTSSILKGITWIDFRSSKGLDAIVKVRVNHIGQIVSVGEY

SEQ ID NO: 829 - protein, 1510 aa, Bacteroides sp.
MKRILGLDLGTNSIGWALVDSEEQRILGMGSRIIPMDQGVLDTFSGGNPVETQTAARTAYRGTRRLRERALLRRERLIRVLNMMKFLPEHYASQIDFEKRLGQFFDEKEPKLAWKQNDEGRFEFIFQQSFNEMIEEFKNKGVVREDKKIPYDWTIYYLRKKALSQEIEKEELAWILLNFNQKRGYYQLRGEEEEENPNKLVEYYSLKIVDVIADEKPNSKGDIWYSLHLENGWIYRRSSKIPLFGWKDKTRDFIVTTDLNDDGTVKKDKEGIEKRSFRAPSENDWVLLKKKTESDIEKSHKTVGAYVYETLLQNPMQKVRGKLVRTIERKFYKDELKQILEKQREFHPELRDEDLYNDCVRELYRSNETYQFILSKRDFVHLFLDDILFYQRPLRSQKSAIGDCILEFKTYKDKDGNNIKEYLKVISKSNPLYQEFRIWQWLYNLKIYRKEDDEDVTLQFIANIEDKEQLFDFLSNRKSIEQKPLLEYLIKAKGLKKQVKTEAYRWNYVEDKIYPCSETKTMISTRLAKVENIPDNFFTKEIEQKLWHIIYSVTDKNEFEKALRTFAKKYDLDIASFVDNFKKIPPFKNEYGSFSEKAIKKLLPLMRLGKYWKWNDIDNNTQNRISKIITGEYDEEIKDIVREKSIALTNENDFQGLQLWLAQYLVYGRHSEADIAGKWHSVADLEKYLNEFKQHSLRNPIVEQIITETLRVVRDIWRKYGQGAENFFSEIHVELGRDMKNTADERKKIVNVVTENENTNLRIKALLMELKNNSDGKLEVENVRPYSPTQQDILKIYEEYAISTGLDNEKDEKVKEDIKKISRVAQPTTTELQRYKLWLEQKYCSPYTGKVIPLGKLFTEEYQIEHIIPKSRYYDDSFSNKVICEAAVNKLKDKCLGLEFIKNYHGQIVETGFGQKVTIFDEEAYQNFVKQHYAYNRSKRTKLLLEEIPEKMIERQMNDTRYISKFVLPLLSNLVRAEENDNGVNSKNVLPVNGKITTMLKQDWGLNDVWNDLILPRFVRMNELAKTIAFTSWNEQHQKYLPTVPLELSKGFQKKRIDHRHHAMDALVIACATRDHVNLLNNKHANTDTIRYDLQRKLRLFERVTYIDPQTKNNVTKDIPKEFKKPWDNFTVDARNELEKIIVSFKQNLRIINKATNIYTKYENGKKIKVGQKGLNWAIRKPLHKETVFAKVSLRKRKTVRLSEALKDWKKIVDKKLKQEIKRLTCQYGKFDVDTILRYFKDRKYQFGEVDVSKVKMYYFDEENAAVRKNVDTSFTEKFIQGSVTDTGIQKILLNHLEAKGNKVEIAFSPEGIEEMNKNIIQLNEGKLHLPIFKVRVYETIGNKFSVGVKGNKKDKYVEAAKGTNLFFAIYVDENGIRSYETIPLNIVIERLKQGLSVVPEKNRKEHSLLFYLSPNDLVYVPIEDERENIHAVNLDQLNNEQRKRIYKMVSCTGSECHFVPYYVASPIVNKVEYSSLNKIGRSLTGEMIKDVCIKLKVDRLGNVKGISGL

SEQ ID NO: 830 - protein, 1436 aa, Bacteroides sp.
MKRILGLDLGTNSIGWALVNEAENKDERSSIVKLGVRVNPLTVDELTNFEKGKSITTNADRTLKRGMRRNLQRYKLRRETLTEVLKEHKLITEDTILSENGNRTTFETYRLRAKAVTEEISLEEFARVLLMINKKRGYKSSRKAKGVEEGTLIDGMDIARELYNNNLTPGELCLQLLDAGKKFLPDFYRSDLQNELDRIWEKQKEYYPEILTDVLKEELRGKKRDAVWAICAKYFVWKETYTEWNKEKGKTEQQEREHKLEGIYSKRKRDEAKRENLQWRVNGLKEKLSLEQLVIVFQEMNTQINNSSGYLGAISDRSKELYFNKQTVGQYQMEMLDKNPNASLRNMVFYRQDYLDEFNMLWEKQAVYHKELTEELKKEIRDIIIFYQRRLKSQKGLIGFCEFESRQIEVDIDGKKKIKTVGNRVISRSSPLFQEFKIWQILNNIEVTVVGKKRKRRKLKENYSAIFEELNDAEQLELNGSRRLCQEEKELLAQELFVRDKMTKSEVLKLLFDNPQELDLNFKTIDGNKTGYALFQAYSKMIEMSGHEPVDFKKPVEKVVEYIKAVFDLLNWNTDILGFNSNEELDNQSYYKLWHLLYSFEGDNTPTGNGRLIQKMTELYGFEKEYATILANVSFQDDYGSLSAKAIHKILPHLKEGNRYDVACVYAGYRHSESSLTREEIANKVLKDRLMLLPKNSLHNPVVEKILNQMVNVINVIIDIYGKPDEIRVELARELKKNAKEREELTKSIAQTTKANEEYKTLLQTEFGLTNVSRTDILRYKLYKELESCGYKTLYSNTYISREKLFSKEFDIEHIIPQARLFDDSFSNKTLEARSVNIEKGNKTAYDFVKEKFGESGADNSLEHYLNNIEDLFKSGKISKTKYNKLKMAEQDIPDGFIERDLRNTQYIAKKALSMLNEISHRVVATSGSVTDKLREDWQLIDVMKELNWEKYKALGLVEYFEDRDGRQIGRIKDWTKRNDHRHHAMDALTVAFTKDVFIQYFNNKNASLDPNANEHAIKNKYFQNGRAIAPMPLREFRAEAKKHLENTLISIKAKNKVITGNINKTRKKGGVNKNMQQTPRGQLHLETIYGSGKQYLTKEEKVNASFDMRKIETVSKSAYRDALLKRLYENDNDPKKAFAGKNSLDKQPIWLDKEQMRKVPEKVKIVTLEAIYTIRKEISPDLKVDKVIDVGVRKILIDRLNEYGNDAKKAFSNLDKNPIWLNKEKGISIKRVTISGISNAQSLHVKKDKDGKPILDENGRNIPVDFVNTGNNHHVAVYYRPVIDKRGQLVVDEAGNPKYELEEVVVSFFEAVTRANLGLPIIDKDYKTTEGWQFLFSMKQNEYFVFPNEKIGFNPKEIDLLDVENYGLISPNLFRVQKFSLKNYVFRHHLETTIKDTSSILRGITWIDFRSSKGLDTIVKVRVNHIGQIVSVGEY

SEQ ID NO: 831 - protein, 1424 aa, Bacteroides sp.
MKRILGLDLGTNSIGWALVNEAETDEEVSSIIRLGVRVNPLTVDETQNFEKGKSITTNAERTLKRSMRRNLQRYKLRRDALVEFLKELGFITDETILSEQGNRTTFETCRLRAKAAEEEISLEELSRVLLMINKKRGYKSSRKVKKEEDGVLIDGMEIAKKLYEEDLTPGQLCSQLLESGKKVLPDFYHSDLQEELDRIWSVQKQFHPDVFCDAAKEEIKGKNRSQTWAILANYFVWKEEVVGWNDREAKNETIEKECKLVGLKRTTKGYELKKENYRWRAQALTEQLGLEEIAVVLQEINGQINASSGYLGAISDRSKVLYFNHQTVGQYQMAELDKNPHASLRNMVFYRQDYLDEFDRIWEKQAEFHKELTAELKKEIRDMIIFYQRRLKSQKGLISFCEFERLEIVVEKDGKKQTKVIGCKVIPRSHPLFQEFKVWQTLNDIKVLGREKKRNALSASESRALYPEEKEILARELAIKENMKKADVLKLLFENPQELDLNFKQIDGNRTGFSLFSAYSKMIEKYGYEPLDFKKPADEIIGQLRTIFTDLGWNTNLFTIDLTKEGKELEMQPYFRLWHLLYSFEGDNTSTGNGKLIEKIMQLCGVEKEYAVELASLSFQDDYGSLSAKAIKRILPYLKEGNLYDVACEYAGYRHSKSSLTKEEIENKVLKGKLEVLPKNSLRNPVVEKILSQMVNVINTIIDTYGKPDEIRVELARELKKSAKEREELTKAIAKSTREHEEIRKLLQDEFGMMNVSRNDIIRYKLYEELKDNGYKTLYSNQYIPKEKIFSKEIDIEHIIPQSRLFDDSLSNKTLEYKAINIEKGNKTAYDFVKEKYGEEGLQQYINRCESLFNDKKAKLRKLKMEQKDIPDGFIDRDLRNTQYIAKKALAMLNEICRRVVATTGSITDQLREDWQLVDVMKELNLPKYEALGFVETYEDKDGRKIKRIKDWTKRNDHRHHAMDALTVAFTKDAFIQYFNNKNAAQDSGNRNHTNIIGIKTRYFDKGRALPPIPLEQFRIEAKQHLEKLLVSIKAKNKVVTVNVNRTKKRKGENTKIQQTPRGQLHLETVYGSHKQYVTKIEKVNASFDAAKIATVSKRAYRNALLKRLETFGNDPKKAFTGKNALEKNPLYADKYQTIRVPEKVQTVEFETIYTIRKPVDPALNVDKVVDVKVRAILERRLKEYGGDPKKAFVNFWENPIWLNKEKGISIKRVSIRGINNAQSIHVKKDKNGNPIWDENGKQIPVDFVNTGNNHHVAIYRKPVLDKKGQVTFDEDGNLMYELDEVVVPFFEAVTRANLGLPIIDKDYRKSEGWQFLFSMKQNEYFVFPNEKTGFNPKEVDLLNPDNYAMISPNLFRVQTMSKVMYGNNVVRDYKFRHHLETTVKDMKELKDIAYKQYKTLSFGNSVVKIRINHIGQIVSVGEY

SEQ ID NO: 832 - protein, 1055 aa, Bacteroides sp.
MRIYRKDLAQDVDVTNELLKTEEDYVALFDWLNGKKEIDQKAFLKYPLFGLKKEVENYRWNYVQDKPYPCNETRSSMLARLEKCDISIEFLTKENEEALWHILYSVEDKNEIVKALQKFADKHDLNASFVDVFQKFPPFKKEYGSYSAKAIKKLLPLMRMGKYWSENSIDKGTRERMDKIITGEYDEKIENRVREKAIHLADVSDFKGLPLWLVCYIVYGRHSEAKEITQWKSPADIDLYLRSFKQHSLRNPIVEQIIIETLRVVRDIWKQVGNIDEIHVELGREMKNPADKRKKMTQQMSENENTNLRIKYLLTEFLNPEYEVENVRPYSPSQQDILRIYEEGVLNSVSDLPEEISDILKKFTETDLKKRPSRSEVLRYKLWLEQKYRSPYTGEVIPLGKLFTPAYEIEHVIPQSCYFDDSFSNKVICEAEVNKLKSNLLGHEFIVKHHGEIVELPFGKKVRIFTVDEYEQFVKDNYSRTRSKMKKLLMDDIPEEFVARQLNDSRYISKVVKSLLSNIVREKGEEEAISKNVIPCTGGVTDRLKKDWGINEVWNKIILPRFQRLNELTGTNKFTTKNVGIQEIPTMPLELQKGFNKKRIDHRHHAMDAIIIACANRNIINYLNNESATAKAELSRYDLQKMLCDKAKTDNNGNYKWVIRKPWASFTQDTYLALENIIVSFKQNLRVINKATNHFLHYNEEGKKIFVKQGKGDNWAIRKSMHKDTVFGEVNLRRIKTVALNEAMKNPQSIVVKDFKRKLLELWNLGFDAKRIKKYFEDNRETWSDINLSKIEVYYFSKDTKDRFFATRKPLDTSFDRKKIENNITDTGIQKILLRHLELKDNNPDIAFSPDGIDEMNRNIIQLNNGKYHQPIIKVRWYEQADKFAVGQTGNKSSKFVEAAKGTNLFFAVYESNILDKKTNTIIKKRNYATIPLNVAIERQKQGLPVAPEDENGNDPIFVLSPNDLVYLPTAADLANGIIAQPLDRGRIYKMVSCTGNEGYFIPARIANPILQTIELGSNNKAQKAWTDEMIKEICMPIKVDRLGNVLESSSSYKK

SEQ ID NO: 833 - protein, 1055 aa, Bacteroides sp.
MRIYRKDLAQDVDVTNELLKTEEDYVALFDWLNGKKEIDQKAFLKYPVFGLKKEIENYRWNYVQDKPYPCNETRSLMLARLEKCDISIEFLTKENEEALWHILYSVEDKNEIVKALQKFADKHDLNASFVDVFQKFPPFKKEYGSYSAKAIKKLLPLMRMGKYWSENSIDKGTRERIDKIITGEYDEKIENRVREKAIHLADVSDFKGLPLWLVCYIVYGRHSEAKEIIQWKSPADIDSYLRSFKQHSLRNPIVEQIIIETLRVVRDIWKQVGNIDEIHVELGREMKNPADKRKKMTQQMSENENTNLRIKYLLTEFLNPEYEVENVRPYSPSQQDILRIYEEGVLNSVSDLPEEISDILKKFTETDLKKRPSRSEVLRYKLWLEQKYRSPYTGEVIPLGKLFTPAYEIEHVIPQSCYFDDSFSNKVICEAEVNKLKSNLLGHEFIVKHHGEIVELPFGKKVRIFTVDEYEQFVKDNYSRTRSKMKKLLMDDIPEEFVTRQLNDSRYISKVVKSLLSNIVREKGEEEAISKNVIPCTGGVTDRLKKDWGINEVWNKIILPRFQRLNELTGTNKFTTKNVGIQEIPTMPLELQKGFNKKRIDHRHHAMDAIIIACANRNIINYLNNESATAKAELSRYDLQKMLCDKAKTDNNGNYKWVIRKPWASFTQDTYLALENIIVSFKQNLRVINKATNRFLHYNEEGKKIFVKQGKGDNWAIRKSMHKDTVFGEVNLRRIKTVALNEAMKNPQSIVVKDFKRKLLELWNLGFDAKRIKKYFEDNRETWSDINLSKIEVYYFSKDTKDRFFATRKPLDTSFDRKKIENNITDTGIQKILLRHLELKDNNPDIAFSPDGIDEMNRNIIQLNNGKYHQPIIKIRWYEQADKFAVGQTGNKSSKFVEAAKGTNLFFAVYESNILDKKTNTIIKKRNYATIPLNVAIERQKQGLPVAPEDENGNDPIFVLSPNDLVYLPTDDELANGIIAQPLDRGRIYKMVSSSGEQCFFIKHIVANVLVDKFEFSPLNKMERALTGEMIKMICIPIKVDRLGNVLESSSSYKK

SEQ ID NO: 834 - protein, 286 aa, Bacteroides uniformis
MLSYKYDKKKIEKYFKENAFLWKELDIAKVAVYYFTENTTEPLVAVRKSLDSTFNEKKIASVTDTGIQKILLNHLKSKEGKAELAFSAEGIEEMNRNLLQLNDGKGHQPIYKVRVYEPRGNKFKVGVLGNKGAKWVEAAKGTNLFFAIYITEDGNRTYETIPLNWVIEREKQGLVPVPDRNEKGDKLLFWLSPNDLVYLPTEEERDFGRINEPIDRGRIYKMVSSSGNQCFFIPQSISNAIISTKELGSNNKAEKSWDGEMIKNICIPVKVDRLGRIIEVKYRVNE

SEQ ID NO: 835 - protein, 1508 aa, Bacteroides uniformis
MRTILGLDLGTNSIGWAVINSVIKEQTERIWIEMAGSRIIPMDAAILGDFDKGNSISQTAERTRFRGVRRLRERQLLRRERLHKVLKILGFLPEHYLKGIDFEKHTGKFLSGSEPKLPWVKDRWGKYSFLFQTAFNEMLADFAKHQPSLVFDGKKIPYDWTVYYLRKKALTEMISKEELAWILLNFNQKRGYYQLRGEEEEDNAGKSVEFYALKVLSVEATDEKKGRDIWYNVHLENGWVYRRSSNVPLDWEGRVKEFIVTTDLNPDGTPKLDKYGEVKRSFRAPKEDDWMLIKKRTEADITGTHKTIGSYIYDALLQEPQQKIIGKLVKTVERKFYKEELNFILQKQCAFHAELQDRDLYMRCIEALYPGNEVQRRNIANRDFIYLLIDDVLFYQRPLKTKKSLIANCPYEENEYVNRKTGEIKTAPLKCIAKSHPLFQEFRLWYFLSNIRVYQKEREVNGTLHLDVDVTTEFLKTEDDYVALFDWLNSRKEIDQKAFLRYPAFGLKKEINNYRWNYVEDKFYPCNETRHAILSRLEKAGIGIDFLSDEKETALWHILYSVSDKQEIEKALATFAVKNGLNESFVEVFKKFPPFKSEYGAYSAKAIKKLLPLMRCGKYWDMSLIDGTTKERIERIIAGECDESIGAKVREKAMNLSDISCFKRLPLWLACYVVYNRHSEDKEITKWETPADIDAYLAAFKQHSLRNPIVEQVITETLRVVRDIWKQVGKIDEIRIELGREMKNPADKRKRMTTQILENENANLRIKALLAEFVNPEYGVENVRPYSPSQQEILRIYEDAVLKGEEQIPEDIDVILKKFNTSKLPTKSEFLRYKLWLEQKYRSPYTGELIPLAKLFTAAYEIEHVIPQSRYFDDSFSNKVICESAVNKLKDNQLGYEFIKNHHGQKVEVGFGKTVEIFSVDSYERFVKEQYAKSGIKMKKLLMDDIPEQFIERQLNDSRYISKVVKGLLSNIVREKNDSGEYEPEAVSKNILVCTGSVTDRLKKDWGMNDVWNSIVSPRFERLNALTETQCFGHWENKDGKKVFQTAVPLEYQKGFSKKRIDHRHHAMDAIVIACATRNHVNYLNNESASRNAKISRYDLQRLLCDKSRGDGNGNYRWIIKKPWTTFTQDAREALSGIIVSLKQNLRIINKTTNIYQHFDANGTRVYEKQKIGDSWAIRKPMHKDTVFGAVNLRKVKVVRLSVALDTPSMIVNKRVKNKVLELLSYKYDKKKIEKYFKENAFLWKELDIAKVAVYYFTENTTEPLVAVRKSLDSTFNEKKIASVTDTGIQKILLNHLKSKEGKAELAFSAEGIEEMNRNLLQLNDGKGHQPIYKVRVYEPRGNKFKVGVLGNKGAKWVEAAKGTNLFFAIYITEDGNRTYETIPLNWVIEREKQGLVPVPDRNEKGDKLLFWLSPNDLVYLPTEEERDFGRINEPIDRGRIYKMVSSSGNQCFFIPQSISNAIISTKELGSNNKAEKSWDGEMIKNICIPVKVDRLGRIIEVKYRVNE

SEQ ID NO: 836 - protein, 1210 aa, Bacteroides uniformis
MRTILGLDLGTNSIGWAVINSVIKEQTERIWIEMAGSRIIPMDAAILGDFDKGNSISQTAERTRFRGVRRLRERQLLRRERLHKVLKILGFLPEHYLKGIDFEKHTGKFLSGSEPKLPWVKDRWGKYSFLFQTAFNEMLADFAKHQPSLVFDGKKIPYDWTVYYLRKKALTEMISKEELAWILLNFNQKRGYYQLRGEEEEDNAGKSVEFYALKVLSVEATDEKKGRDIWYNVHLENGWVYRRSSNVPLDWEGRVKEFIVTTDLNPDGTPKLDKYGEVKRSFRAPKEDDWMLIKKRTEADITGTHKTIGSYIYDALLQEPQQKIIGKLVKTVERKFYKEELNFILQKQCAFHAELQDRDLYMRCIEALYPGNEVQRRNIANRDFIYLLIDDVLFYQRPLKTKKSLIANCPYEENEYVNRKTGEIKTAPLKCIAKSHPLFQEFRLWYFLSNIRVYQKEREVNGTLHLDVDVTTEFLKTEDDYVALFDWLNSRKEIDQKAFLRYPAFGLKKEINNYRWNYVEDKFYPCNETRHAILSRLEKAGIGIDFLSDEKETALWHILYSVSDKQEIEKALATFAVKNGLNESFVEVFKKFPPFKSEYGAYSAKAIKKLLPLMRCGKYWDMSLIDGTTKERIERIIAGECDESIGAKVREKAMNLSDISCFKRLPLWLACYVVYNRHSEDKEITKWETPADIDAYLAAFKQHSLRNPIVEQVITETLRVVRDIWKQVGKIDEIRIELGREMKNPADKRKRMTTQILENENANLRIKALLAEFVNPEYGVENVRPYSPSQQEILRIYEDAVLKGEEQIPEDIDVILKKFNTSKLPTKSEFLRYKLWLEQKYRSPYTGELIPLAKLFTAAYEIEHVIPQSRYFDDSFSNKVICESAVNKLKDNQLGYEFIKNHHGQKVEVGFGKTVEIFSVDSYERFVKEQYAKSGIKMKKLLMDDIPEQFIERQLNDSRYISKVVKGLLSNIVREKNDSGEYEPEAVSKNILVCTGSVTDRLKKDWGMNDVWNSIVSPRFERLNALTETQCFGHWENKDGKKVFQTAVPLEYQKGFSKKRIDHRHHAMDAIVIACATRNHVNYLNNESASRNAKISRYDLQRLLCDKSRGDGNGNYRWIIKKPWTTFTQDAREALSGIIVSLKQNLRIINKTTNIYQHFDANGTRVYEKQKIGDSWAIRKPMHKDTVFGAVNLRKALIPQHYNLTLFISS

SEQ ID NO: 837 - protein, 1504 aa, Bacteroides vulgatus
MKNIVGLDLGTNSIGWAVVNGSVNDDGSEQLVKIQASGSRIIPMDAAMIGDFNKGNSISQTAERTRLRGVRRLSERYLLRRERLHRILDILGFLPFHFAQDLDRHGKIVKGKEPKLAWRKNEAGQFEFIFQDSFKEMLEDFKLNHPNLITDDKKVPYDWTIYYLRKKGLTSKISKEELAWILLNFNQKRGYYQLRGEEEEENKNKLVEFYALKVVAVEDSGEKKGKDIWYNVHLENGWVYRRTSNMPLDWVGKTKEFIVTTDLEKDGTPKKDKEGNVKRSFRAPKEDDWSLLKKKTEADIDQTHKTVGVYIYDTLLGNPSQKIRGRLVRTIERKYYKEELKQILEKQKEFHLELQDRALYAACIEELYPINEAHRNNVGNRDFTYLFLEDILFYQRPLKSKKSLIDNCPYEENQGLDKETGEIKSFPVKCIAKSHPLFQEFRLWQFIVNLRIYRKDLAQDVDVTNELLKTEEDYVALFDWLNGKKEIDQKAFLKYPVFGLKKEIENYRWNYVQDKPYPCNETRSLMLARLEKCDISIEFLTKENEEALWHILYSVEDKNEIVKALQKFADKHDLNASFVDVFQKFPPFKKEYGSYSAKAIKKLLPLMRMGKYWSENSIDKGTRERIDKIITGEYDEKIENRVREKAIHLADVSDFKGLPLWLVCYIVYGRHSEAKEITQWKSPADIDSYLRSFKQHSLRNPIVEQIIIETLRVVRDIWKQVGNIDEIHVELGREMKNPADKRKKMTQQMSENENTNLRIKYLLTEFLNPEYEVENVRPYSPSQQDILRIYEEGVLNSVSDLPEEISDILKKFTETDLKKRPSRSEILRYKLWLEQKYRSPYTGEVIPLGKLFTPAYEIEHVIPQSCYFDDSFSNKVICEAEVNKLKSNLLGHEFIVKHHGEIVELPFGKKVRIFTVDEYEQFVKDNYSRTRSKMKKLLMDDIPEEFVTRQLNDSRYISKVVKSLLSNIVREKGEEEAISKNVIPCTGGVTDRLKKDWGINEVWNKIILPRFQRLNELTGTNKFTTKNVGIQEIPTMPLELQKGFNKKRIDHRHHAMDAIIIACANRNIINYLNNESATAKAELSRYDLQKMLCDKAKTDNNGNYKWVIRKPWASFTQDTYLALENIIVSFKQNLRVINKATNRFLHYNEEGKKIFVKQGKGDNWAIRKSMHKDTVFGEVNLRRIKTVALNEAMKNPQSIVVKDFKRKLLELWNLGFDAKRIKKYFEDNRETWSDINLSKIEVYYFSKDTKDRFFATRKPLDTSFDRKKIENNITDTGIQKILLRHLELKDNNPDIAFSPDGIDEMNRNIIQLNNGKYHQPIIKIRWYEQADKFAVGQTGNKFSKFVEAAKGTNLFFAVYESNILDKKTNTIIKKRNYATIPLNVAIERQKQGLPVAPEDENGNDPIFVLSPNDLVYLPTDDELANGIIAQPLDRGRIYKMVSCTGNEGHFIPARIANPILQTIELGSNNKAQKAWTDEMIKEICMPIKVDRLGNVLESSSSYKK

SEQ ID NO: 838 - protein, 1153 aa, Barnesiella intestinihominis
MKNILGLDLGLSSIGWSVIRENSEEQELVAMGSRVVSLTAAELSSFTQGNGVSINSQRTQKRTQRKGYDRYQLRRTLLRNKLDTLGMLPDDSLSYLPKLQLWGLRAKAVTQRIELNELGRVLLHLNQKRGYKSIKSDFSGDKKITDYVKTVKTRYDELKEMRLTIGELFFRRLTENAFFRCKEQVYPRQAYVEEFDCIMNCQRKFYPDILTDETIRCIRDEIIYYQRPLKSCKYLVSRCEFEKRFYLNAAGKKTEAGPKVSPRTSPLFQVCRLWESINNIVVKDRRNEIVFISAEQRAALFDFLNTHEKLKGSDLLKLLGLSKTYGYRLGEQFKTGIQGNKTRVEIERALGNYPDKKRLLQFNLQEESSSMVNTETGEIIPMISLSFEQEPLYRLWHVLYSIDDREQLQSVLRQKFGIDDDEVLERLSAIDLVKAGFGNKSSKAIRRILPFLQLGMNYAEACEAAGYNHSNNYTKAENEARALLDRLPAIKKNELRQPVVEKILNQMVNVVNALMEKYGRFDEIRVELARELKQSKEERSNTYKSINKNQRENEQIAKRIVEYGVPTRSRIQKYKMWEESKHCCIYCGQPVDVGDFLRGFDVEVEHIIPKSLYFDDSFANKVCSCRSCNKEKNNRTAYDYMKSKGEKALSDYVERVNTMYTNNQISKTKWQNLLTPVDKISIDFIDRQLRESQYIARKAKEILTSICYNVTATSGSVTSFLRHVWGWDTVLHDLNFDRYKKVGLTEVIEVNHRGSVIRREQIKDWSKRFDHRHHAIDALTIACTKQAYIQRLNNLRAEEGPDFNKMSLERYIQSQPHFSVAQVREAVDRILVSFRAGKRAVTPGKRYIRKNRKRISVQSVLIPRGALSEESVYGVIHVWEKDEQGHVIQKQRAVMKYPITSINREMLDKEKVVDKRIHRILSGRLAQYNDNPKEAFAKPVYIDKECRIPIRTVRCFAKPAINTLVPLKKDDKGNPVAWVNPGNNHHVAIYRDEDGKYKERTVTFWEAVDRCRVGIPAIVTQPDTIWDNILQRNDISENVLESLPDVKWQFVLSLQQNEMFILGMNEEDYRYAMDQQDYALLNKYLYRVQKLSKSDYSFRYHTETSVEDKYDGKPNLKLSMQMGKLKRVSIKSLLGLNPHKVHISVLGEIKEIS

SEQ ID NO: 839 - protein, 1352 aa, Belliella baltica
MKKILGLDLGTTSIGWAFIKEPEKDVVGSEIVDMGVRIVPLSSDEENDFAKGNTISINADRTLKRGARRNLQRFKQRRNALLEIFKEKKLISTNFKYAEDGPSSTFSTLNLRAKAAKEKIELQDLVKVLLQINKKRGYKSSRKAKSEEDDGSAIDSMGIAKELYENDLTPGQWVYEALQKGRKNVPDFYRSDLQEEFKKIVNYQSEFFPDIFNASFVEDWMGKASTPTKQYFNKKGVQLAENKGKREERRLQEYKWRAEAVNFKIDLSEIALILSQINSQISNSSGYLGAISDRSKELYFKNLTVGQYLYQQIKKNPHTRLKGQVFYRQDYLDEFERIWSVQSSFYPQLNDALKREVRDITIFFQRRLKSQKHLISNCEFEDHHKVVPKSHPVFQEFRIWQNLNNLLLIKKDNLNEKFDLELESKIALANELAFKRELNVKDALKILGLKPNEWEFNFTKIEGNRTNQAFFDAFAKIIELEDGEPIDLGDLKADDILDQFSEAFLRIGIDTELLQVNSDIEGAEYEKQSYIQFWHLLYSSEDDQKLKLNLIRKFGFKPEHAKILASISLQDDHASLSSRAIKKILPHLQSGLIYDKACTYAGYNHSSSFTKDENEKRELRAELELLKKNSLRNPVVEKILNQMINVVNAILKDPELGRPDEIRVEMARELKANAEQRKNMTSNIASATRDHDKYREILKSEFGLKRVTKNDLLRYKLWLETDGISLYTGKPIEASKLFSKEYDIEHIIPKARLFDDSFSNKTICERQLNIDKANVTAFSFLQNKLSADEFEQYQSRVKSLYGKLSKAKIQKLLMANDKIPEDFIARQLQETRYISKKAKEILFEISRRVSVTTGTITDKLREDWGLVEIMKELNWEKYDKLGLTYTIEGKHGERLNKIKDWSKRNDHRHHAMDALTVALTKPAYIQYLNNLNAKGLNNKKGTEVFAIEQKYLKRENGKLCFIPPIENIRSEAKKHLSRILVSYKAKNKVVTINKNKTKSKAGLNEQIALTPRGQLHKETVYGKSFHYSTKFEKIGASFNVQKINTVAKKEEREALLKRLAENGNDPKKAFTGKNTLNKMPIYLDLGKNIKLSEKVKTVVLEQNYTIRKNIDPDLKVDKVIDVGIKRILESRLEEFGGNAKLAFSNLEENPIWLNKEKGISIKRVKISGVSNVESLHVKKDHFGEPILDQEGNEIPVDFVSTGNNHHVAIYEDENGNLQEEVVSFFEAVVRQNQGLPIIKKNHTLGWKFLFTLKQNEYFVFPSDDFVPADVDLMDEQNYHLISPNLFRVQKIARKNYVFNNHLETKAVDNDLLKSKKELSKITYHFYQTPEHLRGIIKIRINHLGKIIQIGEY

SEQ ID NO: 840 - protein, 1415 aa, Bergeyella zoohelcum
MKHILGLDLGTNSIGWALIERNIEEKYGKIIGMGSRIVPMGAELSKFEQGQAQTKNADRRTNRGARRLNKRYKQRRNKLIYILQKLDMLPSQIKLKEDFSDPNKIDKITILPISKKQEQLTAFDLVSLRVKALTEKVGLEDLGKIIYKYNQLRGYAGGSLEPEKEDIFDEEQSKDKKNKSFIAFSKIVFLGEPQEEIFKNKKLNRRAIIVETEEGNFEGSTFLENIKVGDSLELLINISASKSGDTITIKLPNKTNWRKKMENIENQLKEKSKEMGREFYISEFLLELLKENRWAKIRNNTILRARYESEFEAIWNEQVKHYPFLENLDKKTLIEIVSFIFPGEKESQKKYRELGLEKGLKYIIKNQVVFYQRELKDQSHLISDCRYEPNEKAIAKSHPVFQEYKVWEQINKLIVNTKIEAGTNRKGEKKYKYIDRPIPTALKEWIFEELQNKKEITFSAIFKKLKAEFDLREGIDFLNGMSPKDKLKGNETKLQLQKSLGELWDVLGLDSINRQIELWNILYNEKGNEYDLTSDRTSKVLEFINKYGNNIVDDNAEETAIRISKIKFARAYSSLSLKAVERILPLVRAGKYFNNDFSQQLQSKILKLLNENVEDPFAKAAQTYLDNNQSVLSEGGVGNSIATILVYDKHTAKEYSHDELYKSYKEINLLKQGDLRNPLVEQIINEALVLIRDIWKNYGIKPNEIRVELARDLKNSAKERATIHKRNKDNQTINNKIKETLVKNKKELSLANIEKVKLWEAQRHLSPYTGQPIPLSDLFDKEKYDVDHIIPISRYFDDSFTNKVISEKSVNQEKANRTAMEYFEVGSLKYSIFTKEQFIAHVNEYFSGVKRKNLLATSIPEDPVQRQIKDTQYIAIRVKEELNKIVGNENVKTTTGSITDYLRNHWGLTDKFKLLLKERYEALLESEKFLEAEYDNYKKDFDSRKKEYEEKEVLFEEQELTREEFIKEYKENYIRYKKNKLIIKGWSKRIDHRHHAIDALIVACTEPAHIKRLNDLNKVLQDWLVEHKSEFMPNFEGSNSELLEEILSLPENERTEIFTQIEKFRAIEMPWKGFPEQVEQKLKEIIISHKPKDKLLLQYNKAGDRQIKLRGQLHEGTLYGISQGKEAYRIPLTKFGGSKFATEKNIQKIVSPFLSGFIANHLKEYNNKKEEAFSAEGIMDLNNKLAQYRNEKGELKPHTPISTVKIYYKDPSKNKKKKDEEDLSLQKLDREKAFNEKLYVKTGDNYLFAVLEGEIKTKKTSQIKRLYDIISFFDATNFLKEEFRNAPDKKTFDKDLLFRQYFEERNKAKLLFTLKQGDFVYLPNENEEVILDKESPLYNQYWGDLKERGKNIYVVQKFSKKQIYFIKHTIADIIKKDVEFGSQNCYETVEGRSIKENCFKLEIDRLGNIVKVIKR

SEQ ID NO: 841 - protein, 1430 aa, Bergeyella zoohelcum
MKHILGLDLGTNSIGWAVVKEAQNDNEQSEIVDVGVRVNPLTTDEKTNFEKGKPISTNADRTLKRSARRNLQRYKLRRKELIELLKEHQLISTDTILTENGKGTTFQTLELRAKSAKEKISLEELARVFLTINKKRGYKSSRKAKNEDEGQLIDGMEIAKRLYEENLTTGQLSLQLLKEGKKSLPDYYRSDLQFELDKVWNFQKQFHSDILTDEFYAQLKGKGQRATSALFLAKYQIYTAENKGSREDKKLQAYQWRVDALSKELTREQLAFVITEINNNLNNSSGYLGAISDRSKELYFNNETVGEYLWKQIAANPHTSLKNQVFYRQDYLDEFEQIWKTQSAFYPEILTDELKKELRDVVIFYQRKLKSQKSLVSFCEFENKEIEIKKEDGTSTKKVIGLKVAPKSSPLFQEFKIWQNLNNVLIRKKGSKTKKVAKNQQAVLFEEEKTISELDLEAKQALFNELNLKGNLKADYCLEILGYSPKEWEMNYSVLEGNRTNKALYEAYLKITDLEGYDAKNHLKVKLNKDEVELDDLKVPASEIKDMVQAIFKEAGINTDILHFNAELDGKDFENQASYQLWHLLYSYEGDDSKSGNELLYKLLETKFGFKKEYAQILANVSLSDDYGSLSTKAMRKIHPYIKENKFSTACELAGYRHSKHSLTKEENDNRVLKDSLEVLKKNSLRQPVVEKILNQMINLVNALLKKYRTENPNFKFDEIRIELARELKKNAEERANMTANINKAKTEHEKIIKILKNEFGLPNPTRNDIIRYRLYEELKANGYKDLYTNIKIPQEKLFTKEIDIEHIIPKSRVFDDSFSNKTLSFRKTNLDKGERTAFDYMESKFGADKLEEYVARVEDLYKNNIISKAKYQKLLKKESEIGDGFVERDLRETQYIAKKAKEILLQITPNVLSTSGGITDRLREDWDLINVMKELNLPKYRALGLTQMEDRKYGQQVEVITDWTKRNDHRHHAMDALTVAFTKHNHIQYLNYLNARKNEKHKEHSNIMGIQQLETIKVTDKNGNEKRVFKAPMPNFRQVTKAFLENILISHKAKNKVVTKNKNKVAGSNKVQEVLTPRGQLHKETVYGKYQYYVQKEEKIGAKFDLETIKKVANPLYQSLLKKRLEENGGDPKKAFTGKNSLAKNPIYLDDTQTEQLPEKVKLVWLENSFSIRKDITPENFKDEKLIDKILDEGVKRILKERLQSFGNDAKKAFSDLDKNPIWLNKEKGITIKRVTISGVANAEPLHTKKDHLGKEILDKEGKPIPVDFISTGSNHHVAVYRDEKGNLQEKVVSVFEAVVRANQGLPIIDKTYNQHLGWEFLFTMKQNEMFVFPNESTGFNPNDIDLLDPKNKRIISPNLFRVQKFSKLQYGNSFVREFVFRHHLETTVEDRKELQGITYKQMKNSTFFNDIIKVRINHLGDIVSIGEY

SEQ ID NO: 842 - protein, 1281 aa, Bifidobacterium bifidum
MEDDSQHDIREIYLAIHHMVKYRGNFLVEGTLESSNAFKEDELLKLLGRITRYEMSEGEQNSDIEQDDENKLVAPANGQLADALCATRGSRSMRVDNALEALSAVNDLSREQRAIVKAIFAGLEGNKLDLAKIFVSKEFSSENKKILGIYFNKSDYEEKCVQIVDSGLLDDEEREFLDRMQGQYNAIALKQLLGRSTSVSDSKCASYDAHRANWNLIKLQLRTKENEKDINENYGILVGWKIDSGQRKSVRGESAYENMRKKANVFFKKMIETSDLSETDKNRLIHDIEEDKLFPIQRDSDNGVIPHQLHQNELKQIIKKQGKYYPFLLDAFEKDGKQINKIEGLLAFRVPYFVGPLVVPEDLQKSDNSENHWMVRKKKGEITPWNFDEMVDKDASGRKFIERLVGTDSYLLGEPTLPKNSLLYQEYEVLNELNNVRLSVRTGNHWNDKRRMRLGREEKTLLCQRLFMKGQTVTKRTAENLLRKEYGRTYELSGLSDESKFTSSLSTYGKMCRIFGEKYVNEHRDLMEKIVELQTVFEDKETLLHQLRQLEGISEADCALLVNTHYTGWGRLSRKLLTTKAGECKISDDFAPRKHSIIEIMRAEDRNLMEIITDKQLGFSDWIEQENLGAENGSSLMEVVDDLRVSPKVKRGIIQSIRLIDDISKAVGKRPSRIFLELADDIQPSGRTISRKSRLQDLYRNANLGKEFKGIADELNACSDKDLQDDRLFLYYTQLGKDMYTGEELDLDRLSSAYDIDHIIPQAVTQNDSIDNRVLVARAENARKTDSFTYMPQIADRMRNFWQILLDNGLISRVKFERLTRQNEFSEREKERFVQRSLVETRQIMKNVATLMRQRYGNSAAVIGLNAELTKEMHRYLGFSHKNRDINDYHHAQDALCVGIAGQFAANRGFFADGEVSDGAQNSYNQYLRDYLRGYREKLSAEDRKQGRAFGFIVGSMRSQDEQKRVNPRTGEVVWSEEDKDYLRKVMNYRKMLVTQKVGDDFGALYDETRYAATDPKGIKGIPFDGAKQDTSLYGGFSSAKPAYAVLIESKGKTRLVNVTMQEYSLLGDRPSDDELRKVLAKKKSEYAKANILLRHVPKMQLIRYGGGLMVIKSAGELNNAQQLWLPYEEYCYFDDLSQGKGSLEKDDLKKLLDSILGSVQCLYPWHRFTEEELADLHVAFDKLPEDEKKNVITGIVSALHADAKTANLSIVGMTGSWRRMNNKSGYTFSDEDEFIFQSPSGLFEKRVTVGELKRKAKKEVNSKYRTNEKRLPTLSGASQP

SEQ ID NO: 843 - protein, 1121 aa, Bifidobacterium dentium
MSVGLAAIEVDETGFPIRILNIQSVIHDGGIDPQLGKKKSISRKAISGVARRTRRMRRRKVVRLRQLDATLESLGFPIVEPDSLDTWEIWLTRAKLASSYIQDDETRKEDVSIALRHIARHRGWRNPYSNVESLFVDVAPSEQYEELRRKAEEKLGTSLSGNPTSAEIVECILKRQVGEVQLRTRSRKGVNGNAVEKEGLLPTKLMQSDNAAEIRRIFKVQRIDDETGRKLLRAVFKACSPKGSVERRVGRDALAPGLPRALKASLAFQEYRIANVLTNLVISEDGTKRKLTIAEKQRVFGFLSSNETDDITWIDVAEKLGLERRQIQGVGCLTADGEERISSTPPRNITALHIHSAKPVIREKLVAWWKAASPTVRETMVELLSNTVDIDRVREDMDYSSAVAFIDSLGDEELTALDSVDLLSGRAAYSRQTLKQLTERMLNTDDDLHEARKAVFGVDDNWKPPVDAISTSVGNPAVDRVLKIVNRYLLACQKRWRNPQSVQIEHVRESFSSVAKAKETERVQGERARYRNDLRRELCEQEGLNKIRESDIRRWESVQRQNGTCLYCGSPITFRTCEMDHIVPRKGVGSTNTRVNLAAACAACNKLKSNTAFSVWARTEGAANRKVSQRDAIERVKTFIFNKSVPPREQRAFKQAVISRLRQAESDPAIDNRSIESVAWMADELHRRIEAYFNQDADVSGNTPATQVWVFQGRVTALARKASGIEGRIHFAGEWKKTRLDRRHHAVDAAVIAMMNHSAAQTLVERDSLRLSQWITRKPETWKNYPFSEGQKKTRFKEWLDCMNALLDLLNDALDSDRVPVTRCQRMSLGNSQAHAATIRKMKRVELFSPMDADLIRRASTPALYCALTRLPEYSPEKGLPENRGREIVLNGRHIRSTETVDFFASGAAQLMVRNGSAEIGDSIHHMRIYRYRKTGAKSQEYVYGMIRVFQIDLLHASSENLFAVQLPSQSVSVRYGDKNVVQAIQEGRAEYLGHIVPNDEILISYEGVRMKDSEKIGAYANDFSGTASELAQRRHWVVVGSDVSKLALRPSYLSEEGLENSGSESERLSKQTRKVIEGKGWVVAVNILAKYHPVVIRRNALGEPRFRTNSGMPVSWRWDR

SEQ ID NO: 844 - protein, 354 aa, Bifidobacterium longum
AKQYVNSASIDDAEAETMKTTVSVFQGRVTASARRAAGIEGKIHFIGQQSKTRLDRRHHAVDASVIAMMNTAAAQTLMERESLRESQRLIGLMPGERSWKEYPYEGTSRYESFHLWLDNMDVLLELLNDALDNDRIAVMQSQRYVLGNSIAHDATIHPLEKVPLGSAMSADLIRRASTPALWCALTRLPDYDEKEGLPEDSHREIRVHDTRYSADDEMGFFASQAAQIAVQEGSADIGSAIHHARVYRCWKTNAKGVRKYFYGMIRVFQTDLLRACHDDLFTVPLPPQSISMRYGEPRVVQALQSGNAQYLGSLVVGDEIEMDFSSLDVDGQIGEYLQFFSQFSGGNLAWKHWV

SEQ ID NO: 845 - protein, 1124 aa, Bifidobacterium longum
LTGHSGHTFWPTSSSPPIQLEQEKRPLPQRNTSQNGHTFWPITRERCFMRGKRYRIGIDVGLNSVGLAAVEVSDENSPVRLLNAQSVIHDGGVDPQKNKEAITRKNMSGVARRTRRMRRRKRERLHKLDMLLGKFGYPVIEPESLDKPFEEWHVRAELATRYIEDDELRRESISIALRHMARHRGWRNPYRQVDSLISDNPYSKQYGELKEKAKAYNDDATAAEEESTPAQLVVAMLDAGYAEAPRLRWRTGSKKPDAEGYLPVRLMQEDNANELKQIFRVQRVPADEWKPLFRSVFYAVSPKGSAEQRVGQDPLAPEQARALKASLAFQEYRIANVITNLRIKDASAELRKLTVDEKQSIYDQLVSPSSEDITWSDLCDFLGFKRSQLKGVGSLTEDGEERISSRPPRLTSVQRIYESDNKIRKPLVAWWKSASDNEHEAMIRLLSNTVDIDKVREDVAYASAIEFIDGLDDDALTKLDSVDLPSGRAAYSVETLQKLTRQMLTTDDDLHEARKTLFNVTDSWRPPADPIGEPLGNPSVDRVLKNVNRYLMNCQQRWGNPVSVNIEHVRSSFSSVAFARKDKREYEKNNEKRSIFRSSLSEQLRADEQMEKVRESDLRRLEAIQRQNGQCLYCGRTITFRTCEMDHIVPRKGVGSTNTRTNFAAVCAECNRMKSNTPFAIWARSEDAQTRGVSLAEAKKRVTMFTFNPKSYAPREVKAFKQAVIARLQQTEDDAAIDNRSIESVAWMADELHRRIDWYFNAKQYVNSASIDDAEAETMKTTVSVFQGRVTASARRAAGIEGKIHFIGQQSKTRLDRRHHAVDASVIAMMNTAAAQTLMERESLRESQRLIGLMPGERSWKEYPYEGTSRYESFHLWLDNMDVLLELLNDALDNDRIAVMQSQRYVLGNSIAHDATIHPLEKVPLGSAMSADLIRRASTPALWCALTRLPDYDEKEGLPEDSHREIRVHDTRYSADDEMGFFASQAAQIAVQEGSADIGSAIHHARVYRCWKTNAKGVRKYFYGMIRVFQTDLLRACHDDLFTVPLPPQSISMRYGEPRVVQALQSGNAQYLGSLVVGDEIEMDFPVSMLMVRLASIYNSSRSLVEGTLHGNIGLLMDSLTRRS

SEQ ID NO: 846 - protein, 166 aa, Bifidobacterium longum
MGLAAVEVSDENSPVRLLNAQSVIHDGGVDPQKNKEAITRKNMSGVARRTRRMRRRKRERLHKLDMLLGKFGYPVIEPESLDKPFEEWHVRAELATRYIEDDELRRESISIALRHMARHRGWRNPYRQVDSLISDNPYSKQYGELKEKAKAYNDDATAAEEESTPA

SEQ ID NO: 847 - protein, 1138 aa, Bifidobacterium longum
MNSVGLAAVEVSDENSPVRLLNAQSVIHDGGVDPQKNKEAITRKNMSGVARRTRRMRRRKRERLHKLDMLLGKFGYPVIEPESLDKPFEEWHVRAELATRYIEDDELRRESISIALRHMARHRGWRNPYRQVDSLISDNPYSKQYGELKEKAKAYNDDATAAEEESTPAQLVVAMLDAGYAEAPRLRWRTGSKKPDAEGYLPVRLMQEDNANELKQIFRVQRVPADEWKPLFRSVFYAVSPKGSAEQRVGQDPLAPEQARALKASLAFQEYRIANVITNLRIKDASAELRKLTVDEKQSIYDQLVSPSSEDITWSDLCDFLGFKRSQLKGVGSLTEDGEERISSRPPRLTSVQRIYESDNKIRKPLVAWWKSASDNEHEAMIRLLSNTVDIDKVREDVAYASAIEFIDGLDDDALTKLDSVDLPSGRAAYSVETLQKLTRQMLTTDDDLHEARKTLFNVTDSWRPPADPIGEPLGNPSVDRVLKNVNRYLMNCQQRWGNPVSVNIEHVRSSFSSVAFARKDKREYEKNNEKRSIFRSSLSEQLRADEQMEKVRESDLRRLEAIQRQNGQCLYCGRTITFRTCEMDHIVPRKGVGSTNTRTNFAAVCAECNRMKSNTPFAIWARSEDAQTRGVSLAEAKKRVTMFTFNPKSYAPREVKAFKQAVIARLQQTEDDAAIDNRSIESVAWMADELHRRIDWYFNAKQYVNSASIDDAEAETMKTTVSVFQGRVTASARRAAGIEGKIHFIGQQSKTRLDRRHHAVDASVIAMMNTAAAQTLMERESLRESQRLIGLMPGERSWKEYPYEGTSRYESFHLWLDNMDVLLELLNDALDNDRIAVMQSQRYVLGNSIAHDATIHPLEKVPLGSAMSADLIRRASTPALWCALTRLPDYDEKEGLPEDSHREIRVHDTRYSADDEMGFFASQAAQIAVQEGSADIGSAIHHARVYRCWKTNAKGVRKYFYGMIRVFQTDLLRACHDDLFTVPLPPQSISMRYGEPRVVQALQSGNAQYLGSLVVGDEIEMDFSSLDVDGQIGEYLQFFSQFSGGNLAWKHWVVDGFFNQTQLRIRPRYLAAEGLAKAFSDDVVPDGVQKIVTKQGWLPPVNTASKTAVRIVRRNAFGEPRLSSAHHMPCSWQWRHE

SEQ ID NO: 848 - protein, 182 aa, Bifidobacterium longum
MRGKRYRIGIDVGLNSVGLAAVEVSDENSPVRLLNAQSVIHDGGVDPQKNKEAITRKNMSGVARRTRRMRRRKRERLHKLDMLLGKFGYPVIEPESLDKPFEEWHVRAELATRYIEDDELRRESISIALRHMARHRGWRNPYRQVDSLISDNPYSKQYGELKEKAKAYNDDATAAEEESTPA

SEQ ID NO: 849 - protein, 441 aa, Bifidobacterium longum
MVAMLDAGYAEAPRLRWRTGSKKPDAEGYLPVRLMQEDNANELKQIFRVQRVPADEWKPLFRSVFYAVSPKGSAEQRVGQDPLAPEQARALKASLAFQEYRIANVITNLRIKDASAELRKLTVDEKQSIYDQLVSPSSEDITWSDLCDFLGFKRSQLKGVGSLTEDGEERISSRPPRLTSVQRIYESDNKIRKPLVAWWKSASDNEHEAMIRLLSNTVDIDKVREDVAYASAIEFIDGLDDDALTKLDSVDLPSGRAAYSVETLQKLTRQMLTTDDDLHEARKTLFNVTDSWRPPADPIGEPLGNPSVDRVLKNVNRYLMNCQQRWGNPVSVNIEHVRSSFSSVAFARKDKREYEKNNEKRSIFRSSLSEQLRADEQMEKVRESDLRRLEAIQRQNGQCLYCGRTITFRTCEMDHIVPRKGVGSTNTRTNFAAVCAECNRM

SEQ ID NO: 850 - protein, 967 aa, Bifidobacterium longum
MVAMLDAGYAEAPRLRWRTGSKKPDAEGYLPVRLMQEDNANELKQIFRVQRVPADEWKPLFRSVFYAVSPKGSAEQRVGQDPLAPEQARALKASLAFQEYRIANVITNLRIKDASAELRKLTVDEKQSIYDQLVSPSSEDITWSDLCDFLGFKRSQLKGVGSLTEDGEERISSRPPRLTSVQRIYESDNKIRKPLVAWWKSASDNEHEAMIRLLSNTVDIDKVREDVAYASAIEFIDGLDDDALTKLDSVDLPSGRAAYSVETLQKLTRQMLTTDDDLHEARKTLFNVTDSWRPPADPIGEPLGNPSVDRVLKNVNRYLMNCQQRWGNPVSVNIEHVRSSFSSVAFARKDKREYEKNNEKRSIFRSSLSEQLRADEQMEKVRESDLRRLEAIQRQNGQCLYCGRTITFRTCEMDHIVPRKGVGSTNTRTNFAAVCAECNRMKSNTPFAIWARSEDAQTRGVSLAEAKKRVTMFTFNPKSYAPREVKAFKQAVIARLQQTEDDAAIDNRSIESVAWMADELHRRIDWYFNAKQYVNSASIDDAEAETMKTTVSVFQGRVTASARRAAGIEGKIHFIGQQSKTRLDRRHHAVDASVIAMMNTAAAQTLMERESLRESQRLIGLMPGERSWKEYPYEGTSRYESFHLWLDNMDVLLELLNDALDNDRIAVMQSQRYVLGNSIAHDATIHPLEKVPLGSAMSADLIRRASTPALWCALTRLPDYDEKEGLPEDSHREIRVHDTRYSADDEMGFFASQAAQIAVQEGSADIGSAIHHARVYRCWKTNAKGVRKYFYGMIRVFQTDLLRACHDDLFTVPLPPQSISMRYGEPRVVQALQSGNAQYLGSLVVGDEIEMDFSSLDVDGQIGEYLQFFSQFSGGNLAWKHWVVDGFFNQTQLRIRPRYLAAEGLAKAFSDDVVPDGVQKIVTKQGWLPPVNTASKTAVRIVRRNAFGEPRLSSAHHMPCSWQWRHE

SEQ ID NO: 851 - protein, 1151 aa, Bifidobacterium sp.
MRGKRYRIGIDVGLNSVGLAAVEVSDENSPVRLLNAQSVIHDGGVDPQKNKEAITRKNMSGVARRTRRMRRRKRERLHKLDMLLGKFGYPVIEPESLDKPFEEWHVRAELATRYIEDDELRRESISIALRHMARHRGWRNPYRQVDSLISDNPYSKQYGELKEKAKAYNDDATAAEEESTPAQLVVAMLDAGYAEAPRLRWRTGSKKPDAEGYLPVRLMQEDNANELKQIFRVQRVPADEWKPLFRSVFYAVSPKGSAEQRVGQDPLAPEQARALKASLAFQEYRIANVITNLRIKDASAELRKLTVDEKQSIYDQLVSPSSEDITWSDLCDFLGFKRSQLKGVGSLTEDGEERISSRPPRLTSVQRIYESDNKIRKPLVAWWKSASDNEHEAMIRLLSNTVDIDKVREDVAYASAIEFIDGLDDDALTKLDSVDLPSGRAAYSVETLQKLTRQMLTTDDDLHEARKTLFNVTDSWRPPADPIGEPLGNPSVDRVLKNVNRYLMNCQQRWGNPVSVNIEHVRSSFSSVAFARKDKREYEKNNEKRSIFRSSLSEQLRADEQMEKVRESDLRRLEAIQRQNGQCLYCGRTITFRTCEMDHIVPRKGVGSTNTRTNFAAVCAECNRMKSNTPFAIWARSEDAQTRGVSLAEAKKRVTMFTFNPKSYAPREVKAFKQAVIARLQQTEDDAAIDNRSIESVAWMADELHRRIDWYFNAKQYVNSASIDDAEAETMKTTVSVFQGRVTASARRAAGIEGKIHFIGQQSKTRLDRRHHAVDASVIAMMNTAAAQTLMERESLRESQRLIGLMPGERSWKEYPYEGTSRYESFHLWLDNMDVLLELLNDALDNDRIAVMQSQRYVLGNSIAHDATIHPLEKVPLGSAMSADLIRRASTPALWCALTRLPDYDEKEGLPEDSHREIRVHDTRYSADDEMGFFASQAAQIAVQEGSADIGSAIHHARVYRCWKTNAKGVRKYFYGMIRVFQTDLLRACHDDLFTVPLPPQSISMRYGEPRVVQALQSGNAQYLGSLVVGDEIEMDFSSLDVDGQIGEYLQFFSQFSGGNLAWKHWVVDGFFNQTQLRIRPRYLAAEGLAKAFSDDVVPDGVQKIVTKQGWLPPVNTASKTAVRIVRRNAFGEPRLSSAHHMPCSWQWRHE

SEQ ID NO: 852 - protein, 1092 aa, BreviBacillus laterosporus
MAYTMGIDVGIASCGWAIVDLERQRIIDIGVRTFEKAENPKNGEALAVPRREARSSRRRLRRKKHRIERLKYMFVRNGLAVDIQHLEQTLRSQNEIDVWQLRVDGLDRMLTQKEWLRVLIHLAQRRGFQSNRKTDGSSEDGQVLVNVTENDRLMEEKDYRTVAEMMVKDEKFSDHKRNKNGNYHGVVSRASLLVEIHTLFESQRQHHNFLASKDFELEYINIWSSQRPVATKDQIEKMIGTCTFLPKEKRAPKASWHFQYFMLLQTINHIRITNAQGTRPLNKEEIEQVVNMALTKSKVSYHDIRKVLDLSEEYQFVGLDYGKEDEKKKVESKETIIKLDDYHKLNKIFNEVELAKGETWEAVDYDTVAYALTFFKDDEDIRDYLQNKYKDSKNRLVKNVANKEYTNELIEKVSTLSFRKVGHLSLKALRKIIPFLEQGMTYDKACQAAGFNFQGISKKKRSVVLPVIDQISNPVVNRALTQTRKVINALIKKYGSPETIHIETARELSKRFDERKNITKDYKENRDKNERAKKHLSELGIINPTGLDIVKYKLWCEQQGRCMYSNQPISFERLRESGYTEVDHIIPYSRSMNDSYNNRVLVMTRENREKSNQTPYEYMGNDTQRWDEFEQRVTTNPQIKKEKRQNLLLKGFTNRRELEMLERNLNDTRHITKYLSHFISTNLEFSPSDKKKKVVNTSGRITSHLRSRWGLEKNREQNDLHHAMDAVVIAVTSDSFIQQVTNYYKRKERRELNGDDKFPLPWKFFREEVIARLSPNPKEQIEALPNHFYSEDELADLQPIFVSRMPKRSITGEAHQAQFRRVVGKTKEGKNITAKKTALVDISYDKNGDFNMYGRETDPATYEAIKERYLEFGGNAKKAFSTDLHKPKKDGTKGPLIKSVRIMENKTLVHPVNKGKGVVYNSSIVRTDVFQRKEKYYLLPVYVTDVTKGKLPNKVIAAKKGYDDWIEVDDSFTFLYSLYPNDLIFIRQNPKKKISLKKRIESHSISDSKEVQEILTYYKGVDSSTAAIEFITHDGSYYAKGVGVQNLDCFEKYQVDILGNYSKVKGEKRLELETSDNNHKGKDVNSIKSTSR

SEQ ID NO: 853 - protein, 103 aa, Butyrivibrio fibrisolvens
MISVGQSRKDLEDLGYEFKLSFYKEDIIEYEKNGDILVERFLSRTMPQVRNYIETKPIDRPKYDKRNPVGLSKTSSIRKITMDILGNRFYVDKMSFNNVVGTQ

SEQ ID NO: 854 - protein, 177 aa, Butyrivibrio fibrisolvens
MLIAFSQMGYDAYHELTNKYIDFETGEIIDKEGFNELLNNDLVYKNTMYESKWLKIKGNIEKAAEKNKYWYQVNKKCNRGLCNQTVYGTRESDGDVYKISKIDIRTDDGFKKFKNIVDKGNESVFLMYENDPKTFELIMDIYKNYSDSKNPFVQYEKETGDIIRKYSKKITGQRFLN

SEQ ID NO: 855 - protein, 1442 aa, Caenispirillum salinarum
MPVLSPLSPNAAQGRRRWSLALDIGEGSIGWAVAEVDAEGRVLQLTGTGVTLFPSAWSNENGTYVAHGAADRAVRGQQQRHDSRRRRLAGLARLCAPVLERSPEDLKDLTRTPPKADPRAIFFLRADAARRPLDGPELFRVLHHMAAHRGIRLAELQEVDPPPESDADDAAPAATEDEDGTRRAAADERAFRRLMAEHMHRHGTQPTCGEIMAGRLRETPAGAQPVTRARDGLRVGGGVAVPTRALIEQEFDAIRAIQAPRHPDLPWDSLRRLVLDQAPIAVPPATPCLFLEELRRRGETFQGRTITREAIDRGLTVDPLIQALRIRETVGNLRLHERITEPDGRQRYVPRAMPELGLSHGELTAPERDTLVRALMHDPDGLAAKDGRIPYTRLRKLIGYDNSPVCFAQERDTSGGGITVNPTDPLMARWIDGWVDLPLKARSLYVRDVVARGADSAALARLLAEGAHGVPPVAAAAVPAATAAILESDIMQPGRYSVCPWAAEAILDAWANAPTEGFYDVTRGLFGFAPGEIVLEDLRRARGALLAHLPRTMAAARTPNRAAQQRGPLPAYESVIPSQLITSLRRAHKGRAADWSAADPEERNPFLRTWTGNAATDHILNQVRKTANEVITKYGNRRGWDPLPSRITVELAREAKHGVIRRNEIAKENRENEGRRKKESAALDTFCQDNTVSWQAGGLPKERAALRLRLAQRQEFFCPYCAERPKLRATDLFSPAETEIDHVIERRMGGDGPDNLVLAHKDCNNAKGKKTPHEHAGDLLDSPALAALWQGWRKENADRLKGKGHKARTPREDKDFMDRVGWRFEEDARAKAEENQERRGRRMLHDTARATRLARLYLAAAVMPEDPAEIGAPPVETPPSPEDPTGYTAIYRTISRVQPVNGSVTHMLRQRLLQRDKNRDYQTHHAEDACLLLLAGPAVVQAFNTEAAQHGADAPDDRPVDLMPTSDAYHQQRRARALGRVPLATVDAALADIVMPESDRQDPETGRVHWRLTRAGRGLKRRIDDLTRNCVILSRPRRPSETGTPGALHNATHYGRREITVDGRTDTVVTQRMNARDLVALLDNAKIVPAARLDAAAPGDTILKEICTEIADRHDRVVDPEGTHARRWISARLAALVPAHAEAVARDIAELADLDALADADRTPEQEARRSALRQSPYLGRAISAKKADGRARAREQEILTRALLDPHWGPRGLRHLIMREARAPSLVRIRANKTDAFGRPVPDAAVWVKTDGNAVSQLWRLTSVVTDDGRRIPLPKPIEKRIEISNLEYARLNGLDEGAGVTGNNAPPRPLRQDIDRLTPLWRDHGTAPGGYLGTAVGELEDKARSALRGKAMRQTLTDAGITAEAGWRLDSEGAVCDLEVAKGDTVKKDGKTYKVGVITQGIFGMPVDAAGSAPRTPEDCEKFEEQYGIKPWKAKGIPLA

SEQ ID NO: 856 - protein, 984 aa, Campylobacter coli
MARILAFDIGISSIGWAFSENDELKDCGVRIFTKAENPKTGESLALPRRLARSARKCLARRKARLNHLKHLIANEFKLNYEDYQSFDESLAKAYKGSLISPYELRFRALNELLSKQDFARVILHIAKRRGYDDIKNNGDEEKSEILKAIKQNEEKLVNYQSVGEYLYKEYFQKFKENSKEFINVRNKKESYERCIAQSFLKDELKLIFQKQREFGFSFSKKFEEEVLSVAFYKRALKDFSHLVGNCSFFTDEKRAPKNSPLAFMFVALTRIINLLNNLKNTEGILYTKDDLNALLNEVLKNGTLTYKQTKKLLGLSDDYEFKGEKGTYFIEFKKYKEFIKALGEHNLSQDDLNEIAKDITLIKDEIKLKKALAKYDLNQNQIDSLSKLEFKDHLNISFKALKLITPLMLEGKKYDEACNELNLKVAINEDKKDFLPAFNETYYKDEVTNPVVLRAIKEYRKVLNALLKKYGKVHKINIELAREVGKNHSQRAKIEKEQNENYKAKKDAELECEKLGLKINSKNILKLRLFKEQKEFCAYSGEKIKISDLQDEKMLEIDHIYPYSRSFDDSYMNKVLVFTKQNQEKLNQTPFEAFGNDSAKWQKIEVLAKNLPTKKQKRILDKNYKDKEQKNFKDRNLNDTRYIARLVLNYTKDYLDFLPLSDDENTKLNDTQKGSKVHVEAKSGMLTSALRHTWGFSAKDRNNHLHHAIDAVIIAYANNSIVKAFSDFKKEQESNSAELYAKKISELDYKNKRKFFEPFSGFRQKVLDKIDEIFVSKPERKKPSGALHEETFRKEEEFYQSYGGKEGVLKALELGKIRKVNGKIVKNGDMFRVDIFKHKKTNKFYAVPIYTMDFALKVLPNKAVARSKKGEIKDWILMDENYEFCFSLYKDSLILIQTKDMQEPEFVYYNAFTSSTVSLIVSKHDNKFETLSKNQKILFKNANEKEVIAKSIGIQNLKVFEKYIVSALGEVTKAEFRQREDFKK

SEQ ID NO: 857 - protein, 984 aa, Campylobacter coli
MARILAFDIGISSIGWAFSENDELKDCGVRIFTKAENPKTGESLALPRRLARSARKRLARRKARLNHLKHLIANEFKLNYEDYQSFDESLAKAYKGSLISPYELRFRALNELLSKQDFARVILHIAKRRGYDDIKNNGDEEKGKILKAIKQNEEKLVNYQSVGEYLYKEYFQKFKENSKEFINVRNKKESYERCITQSFLKYELKLIFQKQREFGFSFSKKFEEEVLSVAFYKRALKDFSHLVGNCSFFSDEKRAPKNSPLAFMFVALTRIINLLNNLKNTEGILYTKDDLNALLNEVLKNGTLTYKQTKKLLGLSDDYEFKGEKGTYFIEFKKYKEFIKALGEHNLSQDDLNEIAKDITLIKDEIKLKKALAKYDLNQNQIDSLSKLEFKDHLNISFKALKLITPLMLEGKKYDEACNELNLKVAINEDKKDFLPAFNETYYKDEVTNPVVLRAIKEYRKVLNALLKKYGKVHKINIELAREVGKNYSQRAKIEKEQNENYKAKKDAELECEKLGLKINSKNILKLRLFKEQKEFCAYSGEKIKISDLQDEKMLEIDHIYPYSRSFDDSYMNKVLVFTKQNQEKLNQTPFEAFGNDSAKWQKIEVLAKNLPTKKQKRILDKNYKDKEQKNFKDRNLNDTRYIARLVLNYTKDYLDFLPLSDDENTKLNDTQKGSKVHVEAKSGMLTSALRHTWGFSAKDRNNHLHHAIDAVIIAYANNSIVKAFSDFKKEQESNSAELYAKKISELDYKNKRKFFEPFSGFRQKVLDKIDEIFVSKPERKKPSGALHEETFRKEEEFYQSYGGKEGVLKALELGKIRKVNGKIVKNGDMFRVDIFKHKKTNKFYAVPIYTMDFALKVLPNKAVARSKKGEIKDWILMDENYEFCFSLYKDSLILIQTKDMQEPEFVYYNAFTSSTVSLIVSKHDNKFETLSKNQKILFKNANEKEVIAKSIGIQNLKVFEKYIVSALGEVTKAEFRQREDFKK

SEQ ID NO: 858 - protein, 984 aa, Campylobacter coli
MARILAFDIGISSIGWAFSENDELKDCGVRIFTKAENPKTGESLALPRRLARSARKRLARRKARLNHLKHLIANEFKLNYEDYQSFDESLAKAYKGSLISPYELRFRALNELLSKQDFARVILHIAKRRGYDDIKNNGDEEKSEILKAIKQNEEKLVNYQSVGEYLYKEYFQKFKENSKEFINVRNKKESYERCIAQSFLKDELKLIFQKQREFGFSFSKKFEEEVLSVAFYKRALKDFSHLVGNCSFFTDEKRAPKNSPLAFMFVALTRIINLLNNLKNTEGILYTKDDLNTLLNEVLKNGTLTYKQTKKLLGLSDDYEFKGEKGTYFIEFKKYKEFIKALGEHNLSQDNLNEIAKDITLIKDEIKLKKALAKYDLNQNQIDSLSKLEFKDHLNISFKALKLITPLMLEGKKYDEAYNELNLKVAINEDKKDFLPAFNETYYKDEVTNPVVLRAIKEYRKVLNALLKKYGKVHKINIELAREVGKNHSQRAKIEKEQNENYKAKKDAELECEKLGLKINSKNILKLRLFKEQKEFCAYSGEKIKISDLQDEKMLEIDHIYPYSRSFDDSYMNKVLVFTKQNQEKLNQTPFEAFGNDSAKWQKIEVLAKNLPTKKQKRILDKNYKDKEQKDFKDRNLNDTRYIARLVLNYTKDYLDFLPLSDDENTKLNDTQKGSKVHVEAKSGMLTSALRHTWGFSAKDRNNHLHHAIDAVIIAYANNSIVKAFSDFKKEQESNSAELYAKKISELDYKNKRKFFEPFSGFRQKVLDKIDEIFVSKPERKKPSGALHEETFRKEEEFYQSYGGKEGVLKALELGKIRKVNGKIVKNGDMFRVDIFKHKKTNKFYAVPIYTMDFALKVLPNKAVARSKKGEIKDWILMDENYEFCFSLYKDSLILIQTKDMQEPELVYFNAFTSSTVSLIVSKHDNKFETLSKNQKILFKNANEKEVIAKSIGIQNLKVFEKYIVSALGEVTKAEFRQREDFKK

SEQ ID NO: 859 - protein, 984 aa, Campylobacter coli
MARILAFDIGISSIGWAFSENDELKDCGVRIFTKAENPKTGESLALPRRLARSARKRLARRKARLNHLKHLIANEFKLNYEDYQSFDESLAKAYKGSLISPYELRFRALNELLSKQDFARVILHIAKRRGYDDIKNNGDEEKSEILKAIKQNEEKLVNYQSVGEYLYKEYFQKFKENSKEFINVRNKKESYERCIAQSFLKDELKLIFQKQREFGFSFSKKFEEEVLSVAFYKRALKDFSHLVGNCSFFTDEKRAPKNSPLAFMFVALTRIINLLNNLKNTEGILYTKDDLNALLNEVLKNGTLTYKQTKKLLGLSDDYEFKGEKGTYFIEFKKYKEFIKALGEHNLSQDDLNEIAKDITLIKDEIKLKKALAKYDLNQNQIDSLSKLEFKDHLNISFKALKLITPLMLEGKKYDEACNELNLKVAINEDKKDFLPAFNETYYKDEVTNPVVLRAIKEYRKVLNALLKKYGKVHKINIELAREVGKNYSQRAKIEKEQNENYKAKKDAELECEKLGLKINSKNILKLRLFKEQKEFCAYSGEKIKISDLQDEKMLEIDHIYPYSRSFDDSYMNKVLVFTKQNQEKLNQTPFEAFGNDSAKWQKIEVLAKNLPTKKQKRILDKNYKDKEQKNFKDRNLNDTRYIARLVLNYTKDYLDFLPLSDDENTKLNDTQKGSKVHVEAKSGMLTSALRHTWGFSAKDRNNHLHHAIDAVIIAYANNSIVKAFSDFKKEQESNSAELYAKKISELDYKNKRKFFEPFSGFRQKVLDKIDEIFVSKPERKKPSGALHEETFRKEEEFYQSYGGKEGVLKALELGKIRKVNGKIVKNGDMFRVDIFKHKKTNKFYAVPIYTMDFALKVLPNKAVARSKKGEIKDWILMDENYEFCFSLYKDSLILIQTKDMQEPEFVYYNAFTSSTVSLIVSKHDNKFETLSKNQKILFKNANEKEVIAKSIGIQNLKVFEKYIVSALGEVTKAEFRQREDFKK

SEQ ID NO: 860 - protein, 987 aa, Campylobacter coli
MARILAFDIGISSIGWAFSENDELKDCGVRIFTKAENPKTGESLALPRRLARSARKRLARRKARLNHLKHLIANEFKLNYEDYQSFDESLAKAYKGSLISPYELRFRALNELLSKQDFARVILHIAKRRGYDDIKNNGDEEKSEILKAIKQNEEKLVNYQSVGEYLYKEYFQKFKENSKEFINVRNKKESYERCIAQSFLKDELKLIFQKQREFGFSFSKKFEEEVLSVAFYKRALKDFSHLVGNCSFFTDEKRAPKNSPLAFMFVALTRIINLLNNLKNTEGILYTKDDLNTLLNEVLKNGTLTYKQTKKLLGLSDDYEFKGEKGTYFIEFKKYKEFIKALGEHNLSQDNLNEIAKDITLIKDEIKLKKALAKYDLNQNQIDSLSKLEFKDHLNISFKALKLITPLMLEGKKYDEAYNELNLKVAINEDKKDFLPAFNETYYKDEVTNPVVLRAIKEYRKVLNALLKKYGKVHKINIELAREVGKNHSQRAKIEKEQNENYKAKKDAELECEKLGLKINSKNILKLRLFKEQKEFCAYSGEKIKISDLQDEKMLEIDHIYPYSRSFDDSYMNKVLVFTKQNQEKLNQTPFEAFGNDSAKWQKIEVLAKNLPTKKQKRILDKNYKDKEQKDFKDRNLNDTRYIARLVLNYTKDYLDFLPLSDDENTKLNDTQKGSKVHVEAKSGMLTSALRHTWGFSAKDRNNHLHHAIDAVIIAYANNSIVKAFSDFKKEQESNSAELYAKKISELDYKNKRKFFEPFSGFRQKVLDKIDEIFVSKPERKKPSGALHEETFRKEEEFYQSYGGKEGVLKALELGKIRKVNGKIVKNGDMFRVDIFKHKKTNKFYAVPIYTMDFALKVLPNKAVARSKKGEIKDWILMDENYEFCFSLYKDSLILIQTKDMQEPELVYFNAFTSSTVSLIVSKHDNKFETLSKNQKILFKNANEKEVIAKSIGIQNLKVFEKYIVSALGEVTKAEFRQREDFKNELR

SEQ ID NO: 861 - protein, 984 aa, Campylobacter coli
MARILAFDIGISSIGWAFSENDELKDCGVRIFTKAENPKTGESLALPRRLARSARKRLARRKARLNHLKHLIANEFKLNYEDYQSFDESLAKAYKGSLISPYELRFRALNELLSKQDFARVILHIAKRRGYDDIKNNGDEEKSEILKAIKQNEEKLVNYQSVGEYLYKEYFQKFKENSKEFINVRNKKESYERCIAQSFLKDELKLIFQKQREFGFSFSKKFEEEVLSVAFYKRALKDFSHLVGNCSFFTDEKRAPKNSPLAFMFVALTRIINLLNNLKNTEGILYTKDDLNTLLNEVLKNGTLTYKQTKKLLGLSDDYEFKGEKGTYFIEFKKYKEFIKALGEHNLSQDNLNEIAKDITLIKDEIKLKKALAKYDLNQNQIDSLSKLEFKDHLNISFKALKLITPLMLEGKKYDEAYNELNLKVAINEDKKDFLPAFNETYYKDEVTNPVVLRAIKEYRKVLNALLKKYGKVHKINIELAREVGKNHSQRAKIEKEQNENYKAKKDAELECEKLGLKINSKNILKLRLFKEQKEFCAYSGEKIKISDLQDEKMLEIDHIYPYSRSFDDSYMNKVLVFTKQNQEKLNQTPFEAFGNDSAKWQKIEVLAKNLPTKKQKRILDKNYKDKEQKDFKDRNLNDTRYIARLVLNYTKDYLDFLPLSNDENTKLNDTQKGSKVHVEAKSGMLTSALRHTWGFSAKDRNNHLHHAIDAVIIAYANNSIVKAFSDFKKEQESNSAELYAKKISELDYKNKRKFFEPFSGFRQKVLDKIDEIFVSKPERKKPSGALHEETFRKEEEFYQSYGGKEGVLKALELGKIRKVNGKIVKNGDMFRVDIFKHKKTNKFYAVPIYTMDFALKVLPNKAVARSKKGEIKDWILMDENYEFCFSLYKDSLILIQTKDMQEPELVYFNAFTSSTVSLIVSKHDNKFETLSKNQKILFKNANEKEVIAKSIGIQNLKVFEKYIVSALGEVTKAEFRQREDFKK

SEQ ID NO: 862 - protein, 987 aa, Campylobacter coli
MARILAFDIGISSIGWAFSENDELKDCGVRIFTKAENPKTGESLALPRRLARSARKRLARRKARLNHLKHLIANEFKLNYEDYQSFDESLAKAYKGSLISPYELRFRALNELLSKQDFARVILHIAKRRGYDDIKNSDDKEKGAILKAIKQNEEKLANYQSVGEYLYKEYFQKFKENSKEFTNVRNKKESYERCIAQSFLKDELKLIFKKQREFGFSFSKKFEEEVLSVAFYKRALKDFSHLVGNCSFFTDEKRAPKNSPLAFMFVALTRIINLLNNLKNTEGILYTKDDLNALLNEVLKNGTLTYKQTKKLLGLSDDYEFKGEKGTYFIEFKKYKEFIKALGDHSLSQDDLNEIAKDITLIKDEIKLKKALAKYDLNQNQIDSLSKLEFKDHLNISFKALKLITPLMLEGKKYDEACNELNLKVAINEDKKDFLPAFNETYYKDEVTNPVVLRAIKEYRKVLNALLKKYGKVHKINIELAREVGKNYSQRAKIEKEQNENYKAKKDAELECEKLGLKINSKNILKLRLFKEQKEFCAYSGEKIKISDLQDEKMLEIDHIYPYSRSFDDSYMNKVLVFTKQNQEKLNKTPFEAFGNDSTKWQKIEVLAKNLPEKKQKRILDKNYKDKEQKDFKDRNLNDTRYIARLVLNYTKDYLDFLPLSDDENTKLNDTQKGSKVHVEAKSGMLTSALRHTWGFSTKDRNNHLHHAIDAVIIAYANNSIVKAFSDFKKEQESNSAELYAKKISELDYKNKRKFFEPFSGFRQKVLDKIDEIFVSKPERKKPSGALHEETFRKEEEFYQSYGGKEGVLKALELGKIRKVNGKIVKNGDMFRVDIFKHKKTNKFYAVPIYTMDFALKVLPNKAVARSKKGEIKDWILMDENYEFCFSLYKDSLILIQTKDMQEPEFVYYNAFTSSTVSLIVSKHDNKFETLSKNQKILFKNANEKEVIAKSIGIQNLKVFEKYIVSALGEVTKAEFRQREDFKNELR

SEQ ID NO: 863 - protein, 984 aa, Campylobacter coli
MARILAFDIGISSIGWAFSENDELKDCGVRIFTKAENPKTGESLALPRRLARSARKRLARRKARLNHLKHLIANEFKLNYEDYQSFDESLAKAYKGSLISPYELRFRALNELLSKQDFARVILHIAKRRGYDDIKNSDDKEKGAILKAIKQNEEKLTNYQSVGEYLYKEYFQKFKENSKEFTNVRNKKESYERCIAQSFLKDELKLIFKKQREFGFSFSKKFEEEVLSVAFYKRALKDFSHLVGNCSFFTDEKRAPKNSPLAFMFVALTRIINLLNNLKNTEGILYTKDDLNALLNEVLKNGTLTYKQTKKLLGLSDDYEFKGEKGTYFIEFKKYKEFIKALGDHSLSQDDLNEIAKDITLIKDEIKLKKALAKYDLNQNQIDSLSKLEFKDHLNISFKALKLITPLMLEGKKYDEACNELNLKVAINEDKKDFLPAFNETYYKDEVTNPVVLRAIKEYRKVLNALLKKYGKVHKINIELAREVGKNYSQRAKIEKEQNENYKAKKDAELECEKLGLKINSKNILKLRLFKEQKEFCAYSGEKIKISDLQDEKMLEIDHIYPYSRSFDDSYMNKVLVFTKQNQEKLNQTPFEAFGNDSAKWQKIEVLAKNLPTKKQKRILDKNYKDKEQKDFKDRNLNDTRYIARLVLNYTKDYLDFLPLSDDENTKLNDTQKGSKVHVEAKSGMLTSALRHTWGFSAKDRNNHLHHAIDAVIIAYANNSIVKAFSDFKKEQESNSAELYAKKISELDYKNKRKFFEPFSGFRQKVLDKIDEIFVSKPERKKPSGALHEETFRKEEEFYQSYGGKEGVLKALELGKIRKVNGKIVKNGDMFRVDIFKHKKTNKFYAVPIYTMDFALKVLPNKAVARSKKGEIKDWILMDENYEFCFSLYKDSLILIQTKDMQEPEFVYYNAFTSSTVSLIVSKHDNKFETLSKNQKILFKNANEKEVIAKSIGIQNLKVFEKYIVSALGEVTKAEFRQREDFKK

SEQ ID NO: 864 - protein, 965 aa, Campylobacter coli
MKIIGFNLGIANIGWALRENDEIIDCGVRVFDIPENPKNGNSLALERRENKARMKIVKRKKARMLATKTFLKKELNVDLSKLFLIGSTQSIYELRTKALSSLISKEELSAIILHIAKHRGYDDSALKNENGTIIEALNKNKEAMLKFKSVGEYFYKNFVQNKEVKKIRNTTEDYSNSVPRSLLKQELDLILDKQKELGLIKNADFKAKLFEIIFFKRPLKDFSNKIGNCIFFENEKRAAKNTISACEFVALGKVVNLLKSIEKDIGIVYEKDSINEIMSIILDKTSISYKKIRDILNLPQDINFKGLDYSKNNVENSKLVDLKKLNEFKKALGDGFTNLDKDILDSIATDITLTKDTATLKEKLKNYNVLNAEQIEKLSELVFNDHINLSLKALKQIIPLMYEGKRYDEACELCNFTIAKNQEKNEYLPLFEKTRFAKDISSPVVIRAICEFRKLLNDIIRRYGSVHKIHLELTRDFGISFNDRKKIIKEIEQNEQSRIKALETIKELKLEETSKNIQIVRLFEDQKGICPYSGLKMDLKCLDELVIDYIRPYNRSLDDSYSNKVLTFKKLNDLKQGKTPFEAFGEDEKLWAEINERIKEYNGKKRFKIFDKFFKDKKPFDFTEQTLQDTRWLTKLVASYLNEYLSFLPISEDENTALGYGEKGSKQHVILSSGMITQMLRNFWYLGFKNHKDYKNNAMDAIIVAFTTNSIIFTFNNFKKELDLAKAEFYANKISESDYLLKRKFLPPFSGFKEQALEKVKNIFVSHSLKIKNKGTLHELTPLKIKELKNTYGDLDLAVKLGKIRKYNDKYYANAKGSLVRTDLFADKENKFHAVSIYKADFSTKKLPNKTPATTSNGETKEGIEMNENYNFCMSLYKNTPISVKIKGMKEPIICYYHGFNTSGSKITYKKHDNNYHNLSEDEMVVFRKNDKESIVVGKILEIKKYSISPSGELSLIENEERKWF

SEQ ID NO: 865 - protein, 965 aa, Campylobacter coli
MKIIGFNLGIANIGWALRENDEIIDCGVRVFDIPENPKNGNSLALERRENKARMKIVKRKKARMLATKTFLKKELNVDLSKLFLIGSTQSIYELRTKALSSLISKEELSAIILHIAKHRGYDDSALKNENGTIIEALNKNKEAMLKFKSVGEYFYKNFVQNKEVKKIRNTTEDYSNSVPRSLLKQELDLILDKQKELGLIKNADFKAKLFEIIFFKRPLKDFSNKIGNCIFFENEKRAAKNTISACEFVALGKVVNLLKSIEKDIGIVYEKDSINEIMSIILDKTSISYKKIRDILNLPQDINFKGLDYSKNNAENSKLVDLKKLNEFKKALGDGFANLDKDILDSIATDITLTKDTATLKEKLKNYNVLNAEQIEKLSELVFNDHINLSLKALKQIIPLMYEGKRYDEACELCNFTIAKNQEKNEYLPLFEKTRFAKDISSPVVIRAICEFRKLLNDIIRRYGSVHKIHLELTRDFGISFNDRKKIIKEIEQNEQSRIKALETIKELKLEETSKNIQIVRLFEDQKGICPYSGLKMDLKCLDELVIDYIRPYNRSLDDSYSNKVLTFKKLNDLKQGKTPFEAFGEDEKLWAEINERIKEYNGKKRFKIFDKFFKDKKPFDFTEQTLQDTRWLTKLVASYLNEYLSFLPISEDENTALGYGEKGSKQHVVLSSGMITQMLRNFWYLGFKNHKNYKNNAMDAIIVAFTTNSIIFAFNNFKKELDLAKAEFYANKISESDYLLKRKFLPPFSGFKEQALEKVKNIFVSHSLKIKNKGTLHELTPLKIKELKNTYGDLDLAVKLGKIRKYNDKYYANTKGSLVRTDLFVDKENKFHAVSIYKADFSTKKLPNKTPATTSNGETKEGIEMNENYNFCMSLYKNTPVSVKIKGMKEPIICYYHGFNTSGSKITYKKHDNNYHNLSEDEMVVFRKNDKESIVVGKILEIKKYSISPSGELSLIENEKRKWF

SEQ ID NO: 866 - protein, 965 aa, Campylobacter coli
MKIIGFNLGIANIGWALRENDEIIDCGVRVFDIPENPKNGNSLALERRENKARMKIVKRKKARMLATKTFLKKELNVDLSKLFLIGSTQSIYELRTKALSSLISKEELSAIILHIAKHRGYDDSALKNENGTIIEALNKNKEAMLKFKSVGEYFYKNFVQNKEVKKIRNTTEDYSNSVPRSLLKQELDLILDKQKELGLIKNADFKEKLFEIIFFKRPLKDFSNKIGNCIFFENEKRAAKNTISACEFVALGKVVNLLKSIEKDIGIVYEKDSINEIMSIILDKTSISYKKIRDILNLPQDINFKGLDYSKNNAENSKLVDLKKLNEFKKALGDGFANLDKDILDSIATDITLTKDTATLKEKLKNYNVLNAEQIEKLSELVFNDHINLSLKALKQIIPLMYEGKRYDEACELCNFTIAKNQEKNEYLPLFEKTRFAKDISSPVVIRAICEFRKLLNDIIRRYGSVHKIHLELTRDFGISFNDRKKIIKEIEQNEQSRIKALETIKELKLEETSKNIQIVRLFEDQKGICPYSGLKMDLKCLDELVIDYIRPYNRSLDDSYSNKILTFKKLNDLKQGKTPFEAFGEDEKLWAEINERIKEYNGKKRFKIFDKFFKDKKPFDFTEQTLQDTRWLTKLVASYLNEYLLFLPINEDENTALGYGEKGSKQHVVLSSGMITQMLRNFWYLGFKNHKDYKNNAMDAIIVAFTTNSIIFAFNNFKKELDLAKAEFYANKISESDYLLKRKFLPPFSGFKEQALEKVKNIFVSHSLKIKNKGTLHELTPLKIKELKNTYGDLDLAVKLGKIRKYNDKYYANAKGSLVRTDLFADKENKFHAVSIYKADFSTKKLPNKTPATTSNGETKEGIEMNENYNFCMSLYKNTPISVKIKGMKEPIICYYHGFNTSGSKITYKKHDNNYHNLSEDEMVVFRKNDKESIVVGKILEIKKYSISPSGELSLIENEERKWF

SEQ ID NO: 867 - protein, 933 aa, Campylobacter coli
MKIIGFNLGIANIGWALRENDEIIDCGVRVFDIPENPKNGNSLALERRENKARMKIVKRKKARMLATKTFLKKELNVDLSKLFLIGSTQSIYELRTKALSSLISKEELSVIILHIAKHRGYDDSALKNENGTIIEALNKNKETMLKFKSVGEYFYKNFVQNKEVKKIRNTTEDYSNSVPRSLLKQELDLILDRQKELGLIKNADFKAKLFEIIFFKRPLKDFSNKIGNCIFFENEKRAAKNTISACEFVALGKVVNLLKSIEKDIGIVYEKDSINEIMSIILDKTSISYKKIRDILNLPQDINFKGLDYSKNNVENSKLVDLKKLNEFKKALGDGFTNLDKDILDSIATDITLTKDTATLKEKLKNYNVLNAEQIEKLSELVFNDHINLSLKALKQIIPLMYEGKRYDEACELCNFTIAKNQEKNEYLPLFEKTRFAKDISSPVVIRAICEFRKLLNDIIRRYGSVHKIHLELTRDFGISFNDRKKIIKEIEQNEQSRIKALETIKELKLEETSKNIQIVRLFEDQKGICPYSGLKMDLKCLDELVIDYIRPYNRSLDDSYSNKVLTFKKLNDLKQGKTPFEAFGEDEKLWAEINERIKEYNGKKRFKIFDKFFKDKKPFDFTEQTLQDTRWLTKLVASYLNEHLSFLPISEDENTALGYGEKGSKQHVILSSGMITQMLRNFWYLGFKNHKDYKNNAMDAIIVAFTTNSIIFTFNNFKKELDLAKAEFYANKISESDYLLKRKFLPPFSGFKEQALEKVKNIFVSHSLKIKNKGTLHELTPLKIKELKNTYGDLDLAVKLGKIRKYNDKYYANANGSLVRSDLFIDKKNKFHAVPIYKADFSTKKLPNKTPATTSNGETKEGIEMNENYNFCMSLYKNTPISVKIKGMKESIICYYHGFNTSGSKITYKKHDNNYHNLSEDEMVVFRKNDKE

SEQ ID NO: 868 - protein, 666 aa, Campylobacter jejuni
KGEKGTYFIEFKKYKEFIKALDEHSLSQDDLNEIAKDITLIKDEIKLKKALAKYDLKENQIDSLSKLEFKDHLNISFKALKLITPLMLEGKKYDEACNELNLKVAINEDKKDFLPAFNETYYKDEVTNPVVLRAIKEYRKILNALLKKYGKVHKINIELAREVGKNHSQRAKIEKEQNENYKAKKDAELECEKLGLKINSKNILKLRLFKEQKEFCVYSGEKIKLSDLQDEKMLEIDHIYPYSRSFDDSYMNKVLVFAKQNQEKLNKTPFEAFGNDSTKWQKIEVLTKNLPTKKQKRILDKNYKDKEQKDFKDRNLNDTRYIARLVLNYTKDYLDFLPLSDDENTKLNDTQKGSKVHVEAKSGMLTSALRHTWGFSTKDRNNHLHHAIDAAIIAYANNSIVKAFSDFKKEQESNSAELYAKKISELDYKNKRKFFEPFSGFRQKVLDKIDEIFVSKPERKKPSGALHEETFRKEEEFYQSYGGKEGVLKALELGKIRKVNGKIVKNGDMFRVDIFKHKKTNKFYAVPIYTMDFALKVLPNKAVARSKKGEIKDWILMDEDYEFCFSLYKDSLILIQTKDMQEPELVYFNAFTSSTVSLIVSKHDNKFETLSKNQKILFKNANEKEVIAKSIGIQNLKVFEKYIVSALGEVTKAEFRQREDFKNELR

SEQ ID NO: 869 - protein, 190 aa, Campylobacter jejuni
MAFDIGISSIGWAFSENDELKDCGVRIFTKVENPKTGESLALPRRLARSARKRLARRKARLNHLKHLIANEFKLNYEDYQSFDESLAKAYKGSLISPYELRFRALNELLSKQDFARVILHIAKRRGYDDIKNSDDKEKGAILKAIKQNEEKLANYQSVGEYLYKEYFQKFKENSKEFTNVRNKKKVMNAA

SEQ ID NO: 870 - protein, 985 aa, Campylobacter jejuni
MAKILAFDIGISSIGWAFVENDELKDCGVRIFTKAENPKTGESLALPRRLARSARKRLARRKARLNHLKHLIANEFKLNYEDYQSFDESLAKAYKGTLISPYELRFKALNELLSKQDLARVILHIAKRRGYDNIKNSDDKEKGAILKAVKENEEKLANYKSVGEYLYKEYFQKFKENSKEFINVRNKKESYERCIAQSFLKDELKLIFQKQREFGFNFSKKFEEEVLSVAFYKRALKDFSHLVGNCSFFVDEKRAPKNSPLAFEFVALTRIVNLLNNLNKNNSYIKDDLNALLSEVLKNGTLTYKQTKKILGLSDDYEFKGQKGNYFIEFKKYKEFIKALCEHNLNQDDLNEIAKDITLVKDETKLKKALAKYDLNQNQIENLSKIEFKDHLNISFKALKLIVPLMREGKKYDEVCNELNLKTAINEDKKEFLPAFNETYYKDEVNNPVVLRAIKEYRKVLNSLLKKYGKVHKINIELAREVGKNHRERSKIEKEQNENFKAKKDAELECEKLGLKINSKNILKLRLFKEQKEFCVYSGEKIKISDLQDEKMLEIDHIYPYSRSFDDSYMNKVLVFTKQNQEKLNKTPFEAFGKDDVKWQKIETLAKNLPAKKQKRILDKNYKDKEQKDFKDRNLNDTRYIARLVLNYTKDYLEFLPLSDDENIKLNDTQKGSKVHVEAKSGMLTSVLRHTWGFSTKDRNNHLHHAIDAVIIAYANASVVKAFSDFKKEQENYTAELYAKKINELDFKNKRKFFEPFSNFRQKVLEKIDEIFVSKPERKKPSGALHEETFYKEEEFYKEYGGKEGVLKALELGKIRKVNGKIVSNANMFRVDIFKYKKTNKFYAVPIYTMDFALGILPNKAVVGGKDKQGIIKDWLLMDENYEFCFSLYKDSLILLQTKDMQEPELVYFKSFKSSTAGLVVSKHDNKFENLNENQKKLFKSANEKKVVAEGIGIQNLKVFEKYIVSALGEITKAEIKERENFKKK

SEQ ID NO: 871 - protein, 987 aa, Campylobacter jejuni
MARILAFDIGISSIGWAFSENDELKDCGVRIFTKAENPKTGESLALPRCLARSARKRLARRKARLNHLKHLIANEFKLNYEDYQSFDESLAKAYKGSLISPYELRFRALNELLSKQDFARVILHIAKRRGYDDIKNNGDEEKGEILKAIKQNEEKLVSYQSVGEYLYKEYFQKFKENSKEFINVRNKKESYERCIAQSFLKDELKLIFQKQRKFGFSFSKKFEEEVLSVAFYKRALKDFSHLVGNCSFFTDEKRAPKNSPLAFMFVALTRIINLLNNLKNTEGILYTKDDLNTLLNEVLKNGTLTYKQTKKLLGLSNDYEFKGEKGTYFIEFQKYKEFVKALGEHNLSQDDLNEIAKDITLIKDEIKLKKALAKYDLNQNQIDSLSKLEFKDHLNISFKALKLITPLMLEGKKYDEACNELNLKVAINEDKKDFLPAFNETYYKDEVTNPVVLRAIKEYRKVLNALLKKYGKVHKINIELAREVGKNHSQRAKIEKEQNENYKAKKDAELECEKLGLKINSKNILKLRLFKEQKEFCVYSGEKIKISDLQDEKMLEIDHIYPYSRSFDDSYMNKVLVFTKQNQEKLNKTPFETFGNDRVKWQKIEVLAKNLPTKKQKRILDKNYKDKEQKDFKDRNLNDTRYIARLVLNYTKDYLDFLPLSDDENTKLNDTQKGSKVHVEAKSGMLTSTLRHTWGFSTKDRNNHLHHAIDAAIIAYANNSIVKAFSDFKKEQESNTAELYAKKISELDYKNKRKFFEPFSGFRQKLLDKIDEIFVSKPERKKPSGALHEETFRKEEEFYQSYGGKEGVLKALELGKIRKVNGKIVSNGDMFRVDIFKHKKTNKFYAVPIYTMDFALKVLPNKAVVQGKDKKSGLIKDWILMDENYEFCFSLYKDSLILIQTKDMQEPELVYYERLDSSNASLTVSKHDNKFETLSKNQKILFKNANEKEVIAKSIGIQNLKVFEKYIVSALGEVTKAEFRQREDFKK

SEQ ID NO: 872 - protein, 987 aa, Campylobacter jejuni
MARILAFDIGISSIGWAFSENDELKDCGVRIFTKAENPKTGESLALPRRLARSARKRLARRKARLNHLKHLIANEFKLNYEDYQSFDEGLAKAYKGSLISPYELRFRALNELLSKQDFARVILHIAKRRGYDDIKNNGDEEKSEILKAIKQNEEKLVNYQSVGEYLYKEYFQKFKENSKEFINVRNKKESYERCIAQSFLKDELKLIFQKQREFGFSFSKKFEEEVLSVAFYKRALKDFSHLVGNCSFFTDEKRAPKNSPLAFMFVALTRIINLLNNLKNTEGILYTKDDLNTLLNEVLKNGTLTYKQTKKLLGLSDDYEFKGEKGTYFIEFKKYKEFIKALGEHNLSQDNLNEIAKDITLIKDEIKLKKALAKYDLNQNQIDSLSKLEFKDHLNISFKALKLITPLMLEGKKYDEAYNELNLKVAINEDKKDFLPAFNETYYKDEVTNPVVLRAIKEYRKVLNALLKKYGKVHKINIELAREVGKNHSQRAKIEKEQNENYKAKKDAELECEKLGLKINSKNILKLRLFKEQKEFCAYSGEKIKISDLQDEKMLEIDHIYPYSRSFDDSYMNKVLVFTKQNQEKLNQTPFEAFGNDSAKWQKIEVLAKNLPTKKQKRILDKNYKDKEQKDFKDRNLNDTRYIARLVLNYTKDYLDFLPLSDDENTKLNDTQKGSKVHVEAKSGMLTSALRHTWGFSAKDRNNHLHHAIDAVIIAYANNSIVKAFSDFKKEQESNSAELYAKKISELDYKNKRKFFEPFSGFRQKVLDKIDEIFVSKPERKKPSGALHEETFRKEEEFYQSYGGKEGVLKALELGKIRKVNGKIVKNGDMFRVDIFKHKKTNKFYAVPIYTMDFALKVLPNKAVVQGKDKKSGLIKDWILMDENYEFCFSLYKDSLILIQTKDMQEPELVYFNAFTSSTVSLIVSKHDNKFETLSKNQKILFKNANEKEVIAKSIGIQNLKVFEKYIVSALGEVTKAEFRQREDFKK

SEQ ID NO: 873 - protein, 961 aa, Campylobacter jejuni
MARILAFDIGISSIGWAFSENDELKDCGVRIFTKAENPKTGESLALPRRLARSARKRLARRKARLNHLKHLIANEFKLNYEDYQSFDESLAKAYKGSLISPYELRFRALNELLSKQDFARVILHIAKRRGYDDIKNNGDEEKGKILKAIKQNEEKLVNYQSVGEYLYKEYFQKFKENSKEFINVRNKKESYERCITQSFLKYELKLIFQKQREFGFSFSKKFEEEVLSVAFYKRALKDFSHLVGNCSFFSDEKRAPKNSPLAFMFVALTRIINLLNNLKNTEGILYTKDDLNALLNEVLKNGTLTYKQTKKLLGLSDDYEFKGEKGTYFIEFKKYKEFIKALGEHNLSQDDLNEIAKDITLIKDEIKLKKALAKYDLNQNQIDSLSKLEFKDHLNIGFKALKLITPLMLEGKKYDEACNELNLKVAINEDKKDFLPAFNETYYKDEVTNPVVLRAIKEYRKVLNALLKKYGKVHKINIELAREVGKNHSQRAKIEKEQNENYKAKKDAELECEKLGLKINSKNILKLRLFKEQKEFCAYSGEKIKLSDLQDEKMLEIDHIYPYSRSFDDSYMNKVLVFTKQNQEKLNKTPFEAFGNDNVKWQKIEVLAKNLPEKKQKRILDKNYKDKEQKDFKDRNLNDTRYIARLVLNYTKDYLDFLPLSDDENTKLKGSKVHVEAKSGMLTSALRHTWGFSTKDRNNHLHHAIDAAIIAYANNSIVKDFSDFKKEQESNSAELYAKKISELDYKNKRKFFEPFSGFRQKVLDKIDEIFVSKPERKKPSGALHEETFRKEEEFYQSYGGKEGVLKALELGKIRKVNGKIVKNGDMFRVDIFKHKKTNKFYAVPIYTMDFALKVLPNKAVARSKKGEIKDWILMDENYEFCFSLYKDSLILIQTKDMQEPELVYFNAFTSSTVSLIVSKHDNKFETLSKNLKVFEKYIVSALGEVTKAEFRQREDFKNELR

SEQ ID NO: 874 - protein, 984 aa, Campylobacter jejuni
MARILAFDIGISSIGWAFSENDELKDCGVRIFTKAENPKTGESLALPRRLARSARKRLARRKARLNHLKHLIANEFKLNYEDYQSFDESLAKAYKGSLISPYELRFRALNELLSKQDFARVILHIAKRRGYDDIKNNGDEEKGKILKAIKQNEEKLVNYQSVGEYLYKEYFQKFKENSKEFINVRNKKESYERCITQSFLKYELKLIFQKQREFGFSFSKKFEEEVLSVAFYKRALKDFSHLVGNCSFFTDEKRAPKNSPLAFMFVALTRIINILNNLKNTEGILYTKDDLNALLNEVLKNGTLTYKQTKKLLGLSDDYEFKGEKGTYFIEFKKYKEFIKALGEHNLSQDDLNEIAKDITLIKDEIKLKKALAKYDLNQNQIDSLSKLEFKDHLNISFKALKLITPLMLEGKKYDEACNELNLKVAINEDKKDFLPAFNETYYKDEVTNPVVLRAIKEYRKILNALLKKYGKVHKINIELAREVGKNHSQRAKIEKEQNENYKAKKDAEIECEKLGLKINSKNILKLRLFKEQKEFCAYSGEKIKISDLQDEKMLEIDHIYPYSRSFDDSYMNKVLVFTKQNQEKLNQTPFEAFGNDSAKWQKIEVLAKNLPTKKQKRILDKNYKDKEQKDFKDRNLNDTRYIARLVLNYTKDYLDFLPLSDDENTKLNDTQKGSKVHVEAKSGMLTSALRHTWGFSAKDRNNHLHHAIDAVIIAYANNSIVKAFSDFKKEQESNSAELYAKKISELDYKNKRKFFEPFSGFRQKVLDKIDEIFVSKPERKKPSGALHEETFRKEEEFYQSYGGKEGVLKALELGKIRKVNGKIVKNGDMFRVDIFKHKKTNKFYAVPIYTMDFALKVLPNKAVARSKKGEIKDWILMDENYEFCFSLYKDSLILIQTKDMQEPEFVYYNAFTSSTVSLIVSKHDNKFETLSKNQKILFKNANEKEVIAKSIGIQNLKVFEKYIVSALGEVTKAEFRQREDFKK

SEQ ID NO: 875 - protein, 987 aa, Campylobacter jejuni
MARILAFDIGISSIGWAFSENDELKDCGVRIFTKAENPKTGESLALPRRLARSARKRLARRKARLNHLKHLIANEFKLNYEDYQSFDESLAKAYKGSLISPYELRFRALNELLSKQDFARVILHIAKRRGYDDIKNNGDEEKGKILKAIKQNEEKLVSYQSVGEYLYKEYFQKFKENSKEFINVRNKKESYERCIAQSFLKDELKLIFQKQREFGFSFSKKFEEEVLSVAFYKRALKDFSHLVGNCSFLLMKKERQKNSPLAFMFVALTRIINLLNNLKNTEGILYTKDDLNTLLNEALKNGTLTYKQTKKLLGLSNDYEFKGEKGTYFIEFQKYKEFVKALGEHNLSQDDLNEIAKDITLIKDEIKLKKALAKYDLNQNQIDSLSKLEFKDHLNISFKALKLITPLMLEGKKYDEACNELNLKVAINEDKKDFLPAFNETYYKDEVTNPVVLRAIKEYRKVLNALLKKYGKVHKINIELAREVGKNHSQRAKIEKEQNENYKAKKDAELECEKLGLKINSKNILKLRLFKEQKEFCVYSGEKIKISDLQDEKMLEIDHIYPYSRSFDDSYMNKVLVFTKQNQEKLNKTPFETFGNDRVKWQKIEVLAKNLPTKKQKRILDKNYKDKEQKDFKDRNLNDTRYIARLVLNYTKDYLDFLPLSDDENTKLNDTQKGSKVHVEAKSGMLTSTLRHTWGFSTKDRNNHLHHAIDAAIIAYANNSIVKAFSDFKKEQESNTAELYAKKISELDYKNKRKFFEPFSGFRQKLLDKIDEIFVSKPERKKPSGALHEETFRKEEEFYQSYGGKEGVLKALELGKIRKVNGKMVKNGDMFRVDIFKHKKTNKFYAVPIYTMDFALKVLPNKAVVQGKDKKSGLIKDWILMDENYEFCFSLYKDSLILIQTKDMQEPELVYYERLDSSNASLTVSKHDNKFETLSKNQKILFKNANEKEVIAKSIGIQNLKVFEKYIVSALGEVTKAEFRQREDFKK

SEQ ID NO: 876 - protein, 987 aa, Campylobacter jejuni
MARILAFDIGISSIGWAFSENDELKDCGVRIFTKAENPKTGESLALPRRLARSARKRLARRKARLNHLKHLIANEFKLNYEDYQSFDESLAKAYKGSLISPYELRFRALNELLSKQDFARVILHIAKRRGYDDIKNNGDEEKSEILKAIKQNEEKLVNYQSVGEYLYKEYFQKFKENSKEFINVRNKKESYERCIAQSFLKDELKLIFQKQREFGFSFSKKFEEEVLSVAFYKRALKDFSHLVGNCSFFTDEKRAPKNSPLAFMFVALTRIINLLNNLKNTEGILYTKDDLNTLLNEVLKNGTLTYKQTKKLLGLSDDYEFKGEKGTYFIEFKKYKEFIKALGEHNLSQDNLNEIAKDITLIKDEIKLKKALAKYDLNQNQIDSLSKLEFKDHLNISFKALKLITPLMLEGKKYDEAYNELNLKVAINEDKKDFLPAFNETYYKDEVTNPVVLRAIKEYRKVLNALLKKYGKVHKINIELAREVGKNHSQRAKIEKEQNENYKAKKDAELECEKLGLKINSKNILKLRLFKEQKEFCAYSGEKIKISDLQDEKMLEIDHIYPYSRSFDDSYMNKVLVFTKQNQEKLNQTPFEAFGNDSAKWQKIEVLAKNLPTKKQKRILDKNYKDKEQKDFKDRNLNDTRYIARLVLNYTKDYLDFLPLSDDENTKLNDTQKGSKVHVEAKSGMLTSALRHTWGFSAKDRNNHLHHAIDAVIIAYANNSIVKAFSDFKKEQESNSAELYAKKISELDYKNKRKFFEPFSGFRQKVLDKIDEIFVSKPERKKPSGALHEETFRKEEEFYQSYGGKEGVLKALELGKIRKVNGKIVKNGDMFRVDIFKHKKTNKFYPVPIYTMDFALKVLPNKAVVQGKDKKSGLIKDWILMDENYEFCFSLYKDSLILIQTKDMQEPELVYFNAFTSSTVSLIVSKHDNKFETLSKNQKILFKNANEKEVIAKSIGIQNLKVFEKYIVSALGEVTKAEFRQREDFKK

SEQ ID NO: 877 - protein, 987 aa, Campylobacter jejuni
MARILAFDIGISSIGWAFSENDELKDCGVRIFTKAENPKTGESLALPRRLARSARKRLARRKARLNHLKHLIANEFKLNYEDYQSFDESLAKAYKGSLISPYELRFRALNELLSKQDFARVILHIAKRRGYDDIKNNGDEEKSEILKAIKQNEEKLVNYQSVGEYLYKEYFQKFKENSKEFINVRNKKESYERCIAQSFLKDELKLIFQKQREFGFSFSKKFEEEVLSVAFYKRALKDFSHLVGNCSFFTDEKRAPKNSPLAFMFVALTRIINLLNNLKNTEGILYTKDDLNTLLNEVLKNGTLTYKQTKKLLGLSDDYEFKGEKGTYFIEFKKYKEFIKALGEHNLSQDNLNEIAKDITLIKDEIKLKKALAKYDLNQNQIDSLSKLEFKDHLNISFKALKLITPLMLEGKKYDEAYNELNLKVAINEDKKDFLPAFNETYYKDEVTNPVVLRAIKEYRKVLNALLKKYGKVHKINIELAREVGKNHSQRAKIEKEQNENYKAKKDAELECEKLGLKINSKNILKLRLFKEQKEFCAYSGEKIKISDLQDEKMLEIDHIYPYSRSFDDSYMNKVLVFTKQNQEKLNQTPFEAFGNDSAKWQKIEVLAKNLPTKKQKRILDKNYKDKEQKDFKDRNLNDTRYIARLVLNYTKDYLDFLPLSDDENTKLNDTQKGSKVHVEAKSGMLTSALRHTWGFSAKDRNNHLHHAIDAVIIAYANNSIVKAFSDFKKEQESNSAELYAKKISELDYKNKRKFFEPFSGFRQKVLDKIDEIFVSKPERKKPSGALHEETFRKEEEFHQSYGGKEGVLKALELGKIRKVNGKIVKNGDMFRVDIFKHKKTNKFYAVPIYTMDFALKVLPNKAVVQGKDKKSGLIKDWILMDENYEFCFSLYKDSLILIQTKDMQEPELVYFNAFTSSTVSLIVSKHDNKFETLSKNQKILFKNANEKEVIAKSIGIQNLKVFEKYIVSALGEVTKAEFRQREDFKK

SEQ ID NO: 878 - protein, 987 aa, Campylobacter jejuni
MARILAFDIGISSIGWAFSENDELKDCGVRIFTKAENPKTGESLALPRRLARSARKRLARRKARLNHLKHLIANEFKLNYEDYQSFDESLAKAYKGSLISPYELRFRALNELLSKQDFARVILHIAKRRGYDDIKNNGDEEKSEILKAIKQNEEKLVNYQSVGEYLYKEYFQKFKENSKEFINVRNKKESYERCIAQSFLKDELKLIFQKQREFGFSFSKKFEEEVLSVAFYKRALKDFSHLVGNCSFFTDEKRAPKNSPLAFMFVALTRIINLLNNLKNTEGILYTKDDLNTLLNEVLKNGTLTYKQTKKLLGLSDDYEFKGEKGTYFIEFKKYKEFIKALGEHNLSQDNLNEIAKDITLIKDEIKLKKALAKYDLNQNQIDSLSKLEFKDHLNISFKALKLITPLMLEGKKYDEAYNELNLKVAINEDKKDFLPAFNETYYKDEVTNPVVLRAIKEYRKVLNALLKKYGKVHKINIELAREVGKNHSQRAKIEKEQNENYKAKKDAELECEKLGLKINSKNILKLRLFKEQKEFCAYSGEKIKISDLQDEKMLEIDHIYPYSRSFDDSYMNKVLVFTKQNQEKLNQTPFEAFGNDSAKWQKIEVLAKNLPTKKQKRILDKNYKDKEQKDFKDRNLNDTRYIARLVLNYTKDYLDFLPLSDDENTKLNDTQKGSKVHVEAKSGMLTSALRHTWGFSAKDRNNHLHHAIDAVIIAYANNSIVKAFSDFKKEQESNSAELYAKKISELDYKNKRKFFEPFSGFRQKVLDKIDEIFVSKPERKKPSGALHEETFRKEEEFYQSYGGKEGVLKALELGKIRKVNGKIVKNGDMFRVDIFKHKKTNKFYAVPIYTMDFALKVLPNKAVVQGKDKKSGLIKDWILMDENYEFCFSLYKDSLILIQTKDMQEPELVYFNAFTSSTVSLIVSKHDNKFETLSKNQKILFKNANEKEVIAKSIGIQNLKVFEKYIVSALGEVTKAEFRQREDFKK

SEQ ID NO: 879 - protein, 861 aa, Campylobacter jejuni
MARILAFDIGISSIGWAFSENDELKDCGVRIFTKAENPKTGESLALPRRLARSARKRLARRKARLNHLKHLIANEFKLNYEDYQSFDESLAKAYKGSLISPYELRFRALNELLSKQDFARVILHIAKRRGYDDIKNNGDEEKSEILKAIKQNEEKLVNYQSVGEYLYKEYFQKFKENSKEFINVRNKKESYERCITQSFLKDELKLIFQKQREFGFSFSKKFEEEVLSVAFYKRALKDFSHLVGNCSFFTDEKRAPKNSPLAFMFVALTRIINILNNLKNTEGILYTKDDLNALLNEVLKNGTLTYKQTKKLLGLSDDYEFKGEKGTYFIEFKKYKEFIKALGEHNLSQDDLNEIAKDITLIKDEIKLKKALAKYDLNQNQIDSLSKLEFKDHLNISFKALKLITPLMLEGKKYDEACNELNLKVAINEDKKDFLPAFNETYYKDEVTNPVVLRAIKEYRKILNALLKKYGKVHKINIELAREVGKNHSQRAKIEKEQNENYKAKKDAEIECEKLGLKINSKNILKLRLFKEQKEFCAYSGEKIKLSDLQDEKMLEIDHIYPYSRSFDDSYMNKVLVFTKQNQEKLNKTPFEAFGNDSTKWQKIEVLAKNLPEKKQKRILDKNYKDKEQKDFKDRNLNDTRYIARLVLNYTKDYLDFLPLSDDENTKLNDTQKGSKVHVEAKSGMLTSALRHTWGFSAKDRNNHLHHAIDAAIIAYANNSIVKAFSDFKKEQESNSVELYAKKISELDYKNKRKFFEPFSGFRQKVLDKIDEIFVSKPERKKPSGALHEETFRKEEEFYQSYGGKEGVLKALELGKIRKVNGKIVKNGDMFRVDIFKHKKTNKFLCCANLYYGFCFKSITK

SEQ ID NO: 880 - protein, 462 aa, Campylobacter jejuni
MARILAFDIGISSIGWAFSENDELKDCGVRIFTKAENPKTGESLALPRRLARSARKRLARRKARLNHLKHLIANEFKLNYEDYQSFDESLAKAYKGSLISPYELRFRALNELLSKQDFARVILHIAKRRGYDDIKNNGDEEKSEILKAIKQNEEKLVNYQSVGEYLYKEYFQKFKENSKEFINVRNKKESYERCITQSFLKDELKLIFQKQREFGFSFSKKFEEEVLSVAFYKRALKDFSHLVGNCSFFTDEKRAPKNSPLAFMFVALTRIINILNNLKNTEGILYTKDDLNALLNEVLKNGTLTYKQTKKLLGLSDDYEFKGEKGTYFIEFKKYKEFIKALGEHNLSQDDLNEIAKDITLIKDEIKLKKALAKYDLNQNQIDSLSKLEFKDHLNISFKALKLITPLMLEGKKYDEACNELNLKVAINEDKKDFLPAFNETYYKDEVTNPVVLRAIKEYRKS

SEQ ID NO: 881 - protein, 984 aa, Campylobacter jejuni
MARILAFDIGISSIGWAFSENDELKDCGVRIFTKAENPKTGESLALPRRLARSARKRLARRKARLNHLKHLIANEFKLNYEDYQSFDESLAKAYKGSLISPYELRFRALNELLSKQDFARVILHIAKRRGYDDIKNNGDEEKSEILKAIKQNEEKLVNYQSVGEYLYKEYFQKFKENSKEFINVRNKKESYERCITQSFLKDELKLIFQKQREFGFSFSKKFEEEVLSVAFYKRALKDFSHLVGNCSFFTDEKRAPKNSPLAFMFVALTRIINLLNNLKNTEGILYTKDDLNALLNEVLKNGTLTYKQTKKLLGLSDDYEFKGEKGTYFIEFKKYKEFIKALDEHSLSQDDLNEIAKDITLIKDEIKLKKALAKYDLNQNQIDSLSKLEFKDHLNISFKALKLITPLMLEGKKYDEACNELNLKVAINEDKKDFLPAFNETYYKDEVTNPVVLRAIKEYRKILNALLKKYGKVHKINIELAREVGKNHSQRAKIEKEQNENYKAKKDAEIECEKLGLKINSKNILKLRLFKEQKEFCAYSGEKIKISDLQDEKMLEIDHIYPYSRSFDDSYMNKVLVFTKQNQEKLNKTPFEAFGNDGVKWQKIEVLAKNLPEKKQKRILDKNYKDKEQKDFKDRNLNDTRYIARLVLNYTKDYLDFLPLSDDENTKLNDTQKGSKVHVEAKSGMLTSALRHTWGFSTKDRNNHLHHAIDAAIIAYANNSIVKAFSDFKKEQESNSAELYAKKISELDYKNKRKFFEPFSGFRQKVLDKIDEIFVSKPERKKPSGALHEETFRKEEEFYQSYGGKEGVLKALELGKIRKVNGKIVKNGDMFRVDIFKHKKTNKFYAVPIYTMDFALKVLPNKAVARSKKGEIKDWILMDENYEFCFSLYKDSLILIQTKDMQEPELVYFNAFTSSTVSLVVSKHDNKFETLSKNQKILFKNANEKEVIAKSIGIQNLKVFEKYIVSALGEVTKAEFRQREDFKK

SEQ ID NO: 882 - protein, 984 aa, Campylobacter jejuni
MARILAFDIGISSIGWAFSENDELKDCGVRIFTKAENPKTGESLALPRRLARSARKRLARRKARLNHLKHLIANEFKLNYEDYQSFDESLAKAYKGSLISPYELRFRALNELLSKQDFARVILHIAKRRGYDDIKNSDDKEKGAILKAIKQNEEKLANYQSVGEYLYKEYFQKFKENSKEFTNVRNKKESYERCIAQSFLKDELKLIFKKQREFGFSFSKKFEEEVLSVAFYKRALKDFSHLVGNCSFFTDEKRAPKNSPLAFMFVALTRIINLLNNLKNTEGILYTKDDLNALLNEVLKNGTLTYKQTKKLLGLSDDYEFKGEKGTYFIEFKKYKEFIKALGDHSLSQDDLNEIAKDITLIKDEIKLKKALAKYDLNQNQIDSLSKLEFKDHLNISFKALKLITPLMLEGKKYDEACNELNLKVAINEDKKDFLPAFNETYYKDEVTNPVVLRAIKEYRKVLNALLKKYGKVHKINIELAREVGKNYSQRAKIEKEQNENYKAKKDAELECEKLGLKINSKNILKLRLFKEQKEFCAYSGEKIKISDLQDEKMLEIDHIYPYSRSFDDSYMNKVLVFTKQNQEKLNQTPFEAFGNDSAKWQKIEVLAKNLPTKKQKRILDKNYKDKEQKDFKDRNLNDTRYIARLVLNYTKDYLDFLPLSDDENTKLNDTQKGSKVHVEAKSGMLTSALRHTWGFSAKDRNNHLHHAIDAVIIAYANNSIVKAFSDFKKEQESNSAELYAKKISELDYKNKRKFFEPFSGFRQKVLDKIDEIFVSKPERKKPSGALHEETFRKEEEFYQSYGGKEGVLKALELGKIRKVNGKIVKNGDMFRVDIFKHKKTNKFYAVPIYTMDFALKVLPNKAVARSKKGEIKDWILMDENYEFCFSLYKDSLILIQTKDMQEPEFVYYNAFTSSTVSLIVSKHDNKFETLSKNQKILFKNANEKEVIAKSIGIQNLKVFEKYIVSALGEVTKAEFRQREDFKK

SEQ ID NO: 883 - protein, 984 aa, Campylobacter jejuni
MARILAFDIGISSIGWAFSENDELKDCGVRIFTKAENPKTGESLALPRRLARSARKRLARRKARLNHLKHLIANEFKLNYEDYQSFDESLAKAYKGSLISPYELRFRALNELLSKQDFARVILHIAKRRGYDDIKNSDDKEKGAILKAIKQNEEKLANYQSVGEYLYKEYFQKFKENSKEFTNVRNKKESYERCIAQSFLKDELKLIFKKQREFGFSFSKKFEEEVLSVAFYKRALKDFSHLVGNCSFFTDEKRAPKNSPLAFMFVALTRIINLLNNLKNTEGILYTKDDLNTLLNEVLKNGTLTYKQTKKLLGLSDDYEFKGEKGTYFIEFKKYKEFIKALGEHNLSQDDLNEIAKDITLIKDEIKLKKALAKYDLNQNQIDSLSKLEFKDHLNISFKALKLITPLMLEGKKYDEACNELNLKVAINEDKKDFLPAFNETYYKDEVTNPVVLRAIKEYRKVLNALLKKYGKVHKINIELAREVGKNYSQRAKIEKEQNENYKAKKDAELECEKLGLKINSKNILKLRLFKEQKEFCAYSGEKIKISDLQDEKMLEIDHIYPYSRSFDDSYMNKVLVFTKQNQEKLNKTPFEAFGNDSTKWQKIEVLAKNLPEKKQKRILDKNYKDKEQKDFKDRNLNDTRYIARLVLNYTKDYLDFLPLSDDENTKLNDTQKGLKVHVEAKSGMLTSALRHTWGFSAKDRNNHLHHAIDAVIIAYANNSIVKAFSDFKKEQESNSAELYAKKISELDYKNKRKFFEPFSGFRQKVLDKIDEIFVSKPERKKPSGALHEETFRKEEEFYQSYGGKEGVLKALELGKIRKVNGKIVKNGDMFRVDIFKHKKTNKFYAVPIYTMDFALKVLPNKAVARSKKGEIKDWILMDENYEFCFSLYKDSLILIQTKDMQEPEFVYYNAFTSSTVSLIVSKHDNKFETLSKNQKILFKNANEKEVIAKSIGIQNLKVFEKYIVSALGEVTKAEFRQREDFKK

SEQ ID NO: 884 - protein, 984 aa, Campylobacter jejuni
MARILAFDIGISSIGWAFSENDELKDCGVRIFTKAENPKTGESLALPRRLARSARKRLARRKARLNHLKHLIANEFKLNYEDYQSFDESLAKAYKGSLISPYELRFRALNELLSKQDFARVILHIAKRRGYDDIKNSDDKEKGAILKAIKQNEEKLANYQSVGEYLYKEYFQKFKENSKEFTNVRNKKESYERCIAQSFLKDELKLIFKKQREFGFSFSKKFEEEVLSVAFYKRALKDFSHLVGNCSFFTDEKRAPKNSPLAFMFVALTRIINLLNNLKNTEGILYTKDDLNALLNEVLKNGTLTYKQTKKLLGLSDDYEFKGEKGTYFIEFKKYKEFIKALGDHSLSQDDLNEIAKDITLIKDEIKLKKALAKYDLNQNQIDSLSKLEFKDHLNISFKALKLITPLMLEGKKYDEACNELNLKVAINEDKKDFLPAFNETYYKDEVTNPVVLRAIKEYRKVLNALLKKYGKVHKINIELAREVGKNYSQRAKIEKEQNENYKAKKDAELECEKLGLKINSKNILKLRLFKEQKEFCAYSGEKIKISDLQDEKMLEIDHIYPYSRSFDDSYMNKVLVFTKQNQEKLNQTPFEAFGNDSAKWQKIEVLAKNLPTKKQKRILDKNYKDKEQKNFKDRNLNDTRYIARLVLNYTKDYLDFLPLSDDENTKLNDTQKGSKVHVEAKSGMLTSALRHTWGFSAKDRNNHLHHTIDAVIIAYANNSIVKAFSDFKKEQESNSAELYAKKISELDYKNKRKFFEPFSGFRQKVLDKIDEIFVSKPERKKPSGALHEETFRKEEEFYQSYGGKEGVLKALELGKIRKVNGKIVKNGDMFRVDIFKHKKTNKFYAVPIYTMDFALKVLPNKAVARSKKGEIKDWILMDENYEFCFSLYKDSLILIQTKDMQEPEFVYYNAFTSSTVSLIVSKHDNKFETLSKNQKILFKNANEKEVIAKSIGIQNLKVFEKYIVSALGEVTKAEFRQREDFKK

SEQ ID NO: 885 - protein, 984 aa, Campylobacter jejuni
MARILAFDIGISSIGWAFSENDELKDCGVRIFTKAENPKTGESLALPRRLARSARKRLARRKARLNHLKHLIANEFKLNYEDYQSFDESLAKAYKGSLISPYELRFRALNELLSKQDFARVILHIAKRRGYDDIKNSDDKEKGAILKAIKQNEEKLANYQSVGEYLYKEYFQKFKENSKEFTNVRNKKESYERCIAQSFLKDELKLIFKKQREFGFSFSKKFEEEVLSVAFYKRALKDFSHLVGNCSFFTDEKRAPKNSPLAFMFVALTRIINLLNNLKNTEGILYTKDDLNTFLNEVLKNGTLTYKQTKKLLGLSDDYEFKGEKGTYFIEFKKYKEFIKALGDHNLSQDDLNEIAKDITLIKDEIKLKKALAKYDLNQNQIDSLSKLEFKDHLNISFKALKLITPLMLEGKKYDEACNELNLKVAINEDKKDFLPAFNETYYKDEVTNPVVLRAIKEYRKVLNALLKKYGKVHKINIELAREVGKNHSQRAKIEKEQNENYKAKKDAELECEKLGLKINSKNILKLRLFKEQKEFCAYSGEKIKISDLQDEKMLEIDHIYPYSRSFDDSYMNKVLVFTKQNQEKLNKTPFEAFGNDSAKWQKIEVLAKNLPTKKQKRILDKNYKDKEQKDFKDRNLNDTRYIARLVLNYTKDYLDFLPLSDDENTKLNDTQKGSKVHVEAKSGMLTSALRHTWGFSTKDRNNHLHHAIDAVIIAYANNSIVKAFSDFKKEQESNSAELYAKKISELDYKNKRKFFEPFSGFRQKVLDKIDEIFVSKPERKKPSGALHEETFRKEEEFYQSYGGKEGVLKALELGKIRKVNGKIVKNGDMFRVDIFKHKKTNKFYAVPIYTMDFALKVLPNKAVARSKKGEIKDWILMDENYEFCFSLYKDSLILIQTKDMQEPEFVYYNAFTSSTVSLIVSKHDNKFETLSKNQKILFKNANEKEVIAKSIGIQNLKVFEKYIVSALGEVTKAEFRQREDFKK

SEQ ID NO: 886 - protein, 987 aa, Campylobacter jejuni
MARILAFDIGISSIGWAFSENDELKDCGVRIFTKAENPKTGESLALPRRLARSARKRLARRKARLNHLKHLIANEFKLNYEDYQSFDESLAKAYKGSLISPYELRFRALNELLSKQDFARVILHIAKRRGYDDIKNSDDKEKGAILKAIKQNEEKLANYQSVGEYLYKEYFQKFKENSKEFTNVRNKKESYERCIAQSFLKDELKLIFKKQREFGFSFSKKFEEEVLSVAFYKRALKDFSHLVGNCSFFTDEKRAPKNSPLAFMFVALTRIINLLNNLKNTEGILYTKDDLNTLLNEVLKNGTLTYKQTKKLLGLSDDYEFKGEKGTYFIEFKKYKEFIKSLGDHSLSQDDLNEIAKDITLIKDEIKLKKALAKYDLNQNQIDSLSKLEFKDHLNISFKALKLITPLMLEGKKYDEACNELNLKVAINEDKKDFLPAFNETYYKDEVTNPVVLRAIKEYRKVLNALLKKYGKVHKINIELAREVGKNHSQRAKIEKEQNENYKAKKDAELECEKLGLKINSKNILKLRLFKEQKEFCAYSGEKIKISDLQDEKMLEIDHIYPYSRSFDDSYMNKVLVFTKQNQEKLNQTPFEAFGNDSAKWQKIEVLAKNLPTKKQKRILDKNYKDKEQKNFKDRNLNDTRYIARLVLNYTKDYLDFLPLSDDENTKLNDTQKGSKVHVEAKSGMLTSALRHTWGFSAKDRNNHLHHAIDAVIIAYANNSIVKAFSDFKKEQESNSAELYAKKISELDYKNKRKFFEPFSGFRQKVLDKIDEIFVSKPERKKPSGALHEETFRKEEEFYQSYGGKEGVLKALELGKIRKVNGKIVKNGDMFRVDIFKHKKTNKFYAVPIYTMDFALKVLPNKAVARSKKGEIKDWILMDENYEFCFSLYKDSLILIQTKDMQEPEFVYYNAFTSSTVSLIVSKHDNKFETLSKNQKILFKNANEKEVIAKSIGIQNLKVFEKYIVSALGEVTKAEFRQREDFKNELR

SEQ ID NO: 887 - protein, 987 aa, Campylobacter jejuni
MARILAFDIGISSIGWAFSENDELKDCGVRIFTKAENPKTGESLALPRRLARSARKRLARRKARLNHLKHLIANEFKLNYEDYQSFDESLAKAYKGSLISPYELRFRALNELLSKQDFARVILHIAKRRGYDDIKNSDDKEKGAILKAIKQNEEKLANYQSVGEYLYKEYFQKFKENSKEFTNVRNKKESYERCIAQSFLKDELKLIFKKQREFGFSFSKKFEEEVLSVAFYKRALKDFSHLVGNCSFFTDEKRAPKNSPLAFMFVALTRIINLLNNLKNTEGILYTKDDLNALLNEVLKNGTLTYKQTKKLLGLSDDYEFKGEKGTYFIEFKKYKEFIKALGDHSLSQDDLNEIAKDITLIKDEIKLKKALVKYDLNQNQIDSLSKLEFKDHLNISFKALKLITPLMLEGKKYDEACNELNLKVAINEDKKDFLPAFNETYYKDEVTNPVVLRAIKEYRKVLNALLKKYGKVHKINIELAREVGKNYSQRAKIEKEQNENYKAKKDAELECEKLGLKINSKNILKLRLFKEQKEFCAYSGEKIKISDLQDEKMLEIDHIYPYSRSFDDSYMNKVLVFTKQNQEKLNQTPFEAFGNDSAKWQKIEVLAKNLPTKKQKRILDKNYKDKEQKDFKDRNLNDTRYIARLVLNYTKDYLDFLPLSDDENTKLNDTQKGSKVHVEAKSGMLTSALRHTWGFSAKDRNNHLHHAIDAVIIAYANNSIVKAFSDFKKEQESNSAELYAKKISELDYKNKRKFFEPFSGFRQKVLDKIDEIFVSKPERKKPSGALHEETFRKEEEFYQSYGGKEGVLKALELGKIRKVNGKIVKNGDMFRVDIFKHKKTNKFYAVPIYTMDFALKVLPNKAVARSKKGEIKDWILMDENYEFCFSLYKDSLILIQTKDMQEPELVYFNAFTSSTVSLIVSKHDNKFETLSKNQKILFKNANEKEVIAKSIGIQNLKVFEKYIVSALGEVTKAEFRQREDFKNELR

SEQ ID NO: 888 - protein, 983 aa, Campylobacter jejuni; identical to SEQ ID NO: 231

SEQ ID NO: 889 - protein, 987 aa, Campylobacter jejuni
MARILAFDIGISSIGWAFSENDELKDCGVRIFTKAENPKTGESLALPRRLARSARKRLARRKARLNHLKHLIANEFKLNYEDYQSFDESLAKAYKGSLISPYELRFRALNELLSKQDFARVILHIAKRRGYDDIKNSDDKEKGAILKAIKQNEEKLVNYQSVGEYLYKEYFQKFKENSKEFTNVRNKKESYERCIAQSFLKDELKLIFKKQREFGFSFSKKFEEEVLSVAFYKRALKDFSHLVGNCSFFTDEKRAPKNSPLAFMFVALTRIINLLNNLKNTEGILYTKDDLNALLNEVLKNGTLTYKQTKKLLGLSDDYEFKGEKGTYFIEFKKYKEFIKALGDHSLSQDDLNEIAKDITLIKDEIKLKKALAKYDLNQNQIDSLSKLEFKDHLNISFKALKLITPLMLEGKKYDEACNELNLKVAINEDKKDFLPAFNETYYKDEVTNPVVLRAIKEYRKVLNALLKKYGKVHKINIELAREVGKNYSQRAKIEKEQNENYKAKKDAELECEKLGLKINSKNILKLRLFKEQKEFCAYSGEKIKISDLQDEKMLEIDHIYPYSRSFDDSYMNKVLVFTKQNQEKLNQTPFEAFGNDSAKWQKIEVLAKNLPTKKQKRILDKNYKDKEQKDFKDRNLNDTRYIARLVLNYTKDYLDFLPLSDDENTKLNDTQKGSKVHVEAKSGMLTSALRHTWGFSAKDRNNHLHHAIDAVIIAYANNSIVKAFSDFKKEQESNSAELYAKKISELDYKNKRKFFEPFSGFRQKVLDKIDEIFVSKPERKKPSGALHEETFRKEEEFYQSYGGKEGVLKALELGKIRKVNGKIVKNGDMFRVDIFKHKKTNKFYAVPIYTMDFALKVLPNKAVARSEKGEIKDWILMDENYEFCFSLYKDSLILIQTKDMQEPELVYFNAFTSSTVSLIVSKHDNKFETLSKNQKILFKNANEKEVIAKSIGIQNLKVFEKYIVSALGEVTKAEFRQREDFKNELR

SEQ ID NO: 890 - protein, 987 aa, Campylobacter jejuni
MARILAFDIGISSIGWAFSENDELKDCGVRIFTKAENPKTGESLALPRRLARSARKRLARRKARLNHLKHLIANEFKLNYEDYQSFDESLAKAYKGSLISPYELRFRALNELLSKQDFARVILHIAKRRGYDNIKNSDNEEKSEILKAIKQNEEKLVNYQSVGEYLYKEYFQKFKENSKEFINVRNKKESYERCIAQSFLKDELKLIFQKQREFGLSFSKKFEEEVLSVAFYKRALKDFSHLVGNCSFFTDEKRAPKNSPLAFMFVALTRIINLLNNLKNTEGILYTKDDLNTLLNEVLKNGTLTYKQTKKLLGLSDDYEFKGEKGTYFIEFKKYKEFIKALGDHSLSQDDLNEIAKDITLIKDEIKLKKALAKYDLNQNQIDSLSKLEFKDHLNISFKALKLITPLMLEGKKYDEACNELNLKVVINEDKKDFLPAFNETYYKDEVTNPVVLRAIKEYRKVLNALLKKYGKVHKINIELAREVGKNHSQRAKIEKEQNENYKAKKDAELECEKLGLKINNKNILKLRLFKEQKEFCAYSGEKIKLSDLQDEKMLEIDHIYPYSRSFDDSYMNKVLVFTKQNQEKLNKTPFEAFGNDSTKWQKIEVLAKNLPTKKQKRILDKNYKDKEQKDFKDRNLNDTRYIARLVLNYTKDYLDFLPLSDDENTKLNDIQKGSKVHVEAKSGMLTSALRHTWGFSTKDRNNHLHHAIDAVIIAYANNSIVKAFSDFKKEQESNSAELYAKKISELDYKNKRKFFEPFSGFRQKVLDKIDEIFVSKPERKKPSGALHEETFRKEEEFYQSYGGKEGVLKALELGKIRKVNGKIVKNGDMFRVDIFKHKKTNKFYAVPIYTMDFALKVLPNKAVVQGKDKKSGLIKDWILMDENYEFCFSLYKDSLILIQTKDMQEPEFVYYNAFTSSTVSLIVSKHDNKFETLSKNQKILFKNANEKEVIAKSIGIQNLKVFEKYIVSALGEVTKAEFRQREDFKK

SEQ ID NO: 891 - protein, 984 aa, Campylobacter jejuni
MARILAFDIGISSIGWAFSENDELKDCGVRIFTKAENPKTGESLALPRRLARSARKRLARRKARLNHLKHLIANEFKLNYEDYQSFDESLAKAYKGSLISPYELRFRALNELLSKQDFARVILHIVKRRGYDDIKNSDDKEKGAILKAIKQNEEKLANYQSVGEYLYKEYFQKFKENSKEFTNVRNKKESYERCIAQSFLKDELKLIFKKQREFGFSFSKKFEEEVLSVAFYKRALKDFSHLVGNCSFFTDEKRAPKNSPLAFMFVALTRIINLLNNLKNTEGILYTKDDLNTLLNEVLKNGTLTYKQTKKLLGLSDDYEFKGEKGTYFIEFKKYKEFIKALGDHSLSQDDLNEIAKDITLIKDEIKLKKALAKYDLNQNQIDSLSKLEFKDHLNISFKALKLITPLMLEGKKYDEACNELNLKVAINEDKKDFLPAFNETYYKDEVTNPVVLRAIKEYRKVLNALLKKYGKVHKINIELAREVGKNHSQRAKIEKEQNENYKAKKDAEFECEKLGLKINSKNILKLRLFKEQKEFCAYSGEKIKISDLQDEKMLEIDHIYPYSRSFDDSYMNKVLVFTKQNQEKLNKTPFEAFGNDSAKWQKIEVLAKNLPTKKQKRILDKNYKDKEQKDFKDRNLNDTRYIARLVLNYTKDYLDFLPLSDDENTKLNDTQKGSKVHVEAKSGMLTSALRHTWGFSTKDRNNHLHHAIDAVIIAYANNSIVKAFSDFKKEQESNSAELYAKKISELDYKNKRKFFEPFSGFRQKVLDKIDEIFVSKPERKKPSGALHEETFRKEEEFYQSYGGKEGVLKALELGKIRKVNGKIVKNGDMFRVDIFKHKKTNKFYAVPIYTMDFALKVLPNKAVARSKKGEIKDWILMDENYEFCFSLYKDSLILIQTKDMQEPEFVYYNAFTSSTVSLIVSKHDNKFETLSKNQKILFKNANEKEVIAKSIGIQNLKVFEKYIVSALGEVTKAEFRQREDFKK

SEQ ID NO: 892 - protein, 984 aa, Campylobacter jejuni
MARILAFDIGISSIGWAFSENDELKDCGVRIFTKAENPKTGESLALPRRLARSARKRLARRKARLNHLKHLIANEFKLNYEDYQSFDESLAKAYKGSLISPYELRFRALNELLSKQDFARVILHIVKRRGYDDIKNSDDKEKGTILKAIKQNEEKLANYQSVGEYLYKEYFQKFKENSKEFTNVRNKKESYERCIAQSFLKDELKLIFKKQREFGFSFSKKFEEEVLSVAFYKRALKDFSHLVGNCSFFTDEKRAPKNSPLAFMFVALTRIINLLNNLKNTEGILYTKDDLNTLLNEVLKNGTLTYKQTKKLLGLSDDYEFKGEKGTYFIEFKKYKEFIKALGEHNLSQDDLNEIAKDITLIKDEIKLKKALAKYDLNQNQIDSLSKLEFKDHLNISFKALKLITPLMLEGKKYDEACNELNLKVAINEDKKDFLPAFNETYYKDEVTNPVVLRAIKEYRKVLNALLKKYGKVHKINIELAREVGKNYSQRAKIEKEQNENYKAKKDAELECEKLGLKINSKNILKLRLFKEQKEFCAYSGEKIKISDLQDEKMLEIDHIYPYSRSFDDSYMNKVLVFTKQNQEKLNQTPFEAFGNDSAKWQKIEVLAKNLPTKKQKRILDKNYKDKEQKDFKDRNLNDTRYIARLVLNYTKDYLDFLPLSDDENTKLNDTQKGSKVHVEAKSGMLTSALRHTWGFSAKDRNNHLHHAIDAVIIAYANNSIVKAFSDFKKEQESNSAELYAKKISELDYKNKRKFFEPFSGFRQKVLDKIDEIFVSKPERKKPSGALHEETFRKEEEFYQSYGGKEGVLKALELGKIRKVNGKIVKNGDMFRVDIFKHKKTNKFYAVPIYTMDFALKVLPNKAVARSKKGEIKDWILMDENYEFCFSLYKDSLILIQTKDMQEPEFVYYNAFTSSTVSLIVSKHDNKFETLSKNQKILFKNANEKEVIAKSIGIQNLKVFEKYIVSALGEVTKAEFRQREDFKK

SEQ ID NO: 893 - protein, 987 aa, Campylobacter jejuni
MARILAFDIGISSIGWAFSENDELKDCGVRIFTKAENPKTGESLALPRRLARSARKRLARRKARLNHLKHLIANEFKLNYEDYQSFNESLAKAYKGSLISPYELRFRALNELLSKQDFARVILHIAKRRGYDDIKNSDDKEKGAILKVIKQNEEKLANYQSVGEYLYKEYFQKFKENSKEFTNVRNKKESYERCIAQSFLKDELKLIFQKQREFGFSFSKKFEEEVLSVAFYKRALKDFSHLVGNCSFFTDEKRAPKNSPLAFMFVALTRIINLLNNLKNTEGILYTKDDLNALLNEVLKNGTLTYKQTKKLLGLSDDYEFKGEKGTYFIEFKKYKEFIKALGDHSLSQDDLNEIAKDITLIKDEIKLKKALAKYDLNQNQIDSLSKLEFKDHLNISFKALKLITPLMLEGKKYDEACNELNLKVAINEDKKDFLPAFNETYYKDEVTNPVVLRAIKEYRKVLNALLKKYGKVHKINIELAREVGKNYSQRAKIEKEQNENYKAKKDAELECEKLGLKINSKNILKLRLFKEQKEFCAYSGEKIKISDLQDEKMLEIDHIYPYSRSFDDSYMNKVLVFTKQNQEKLNQTPFEAFGNDSAKWQKIEVLAKNLPTKKQKRILDKNYKDKEQKDFKDRNLNDTRYIARLVLNYTKDYLDFLPLSDDENTKLNDTQKGSKVHVEAKSGMLTSALRHTWGFSAKDRNNHLHHAIDAVIIAYANNSIVKAFSDFKKEQESNSAELYAKKISELDYKNKRKFFEPFSGFRQKVLDKIDEIFVSKPERKKPSGALHEETFRKEEEFYQSYGGKEGVLKALELGKIRKVNGKIVKNGDMFRVDIFKHKKTNKFYAVPIYTMDFALKVLPNKAVARSKKGEIKDWILMDENYEFCFSLYKDSLILIQTKDMQEPELVYFNAFTSSTVSLIVSKHDNKFETLSKNQKILFKNANEKEVIAKSIGIQNLKVFEKYIVSALGEVTKAEFRQREDFKNELR

SEQ ID NO: 894 - protein, 984 aa, Campylobacter jejuni
MARILAFDIGISSIGWAFSENDELKDCGVRIFTKAENPKTGESLALPRRLARSARKRLARRKARLNRLKHLIANEFKLNYEDYQSFDESLAKAYKGSLISPYELRFRALNELLSKQDFARVILHIAKRRGYDDIKNSDDKEKGAILKAIKQNEEKLANYQSVGEYLYKEYFQKFKENSKEFTNVRNKKESYERCIAQSFLKDELKLIFKKQREFGFSFSKKFEEEVLSVAFYKRALKDFSHLVGNCSFFTDEKRAPKNSPLAFMFVALTRIINLLNNLKNTEGILYTKDDLNALLNEVLKNGTLTYKQTKKLLGLSDDYEFKGEKGTYFIEFKKYKEFIKALGDHSLNQDDLNEIAKDITLIKDEIKLKKALAKYDLNQNQIDSLSKLEFKDHLNISFKALKLITPLMLEGKKYDEACNELNLKVAINEDKKDFLPAFNETYYKDEVTNPVVLRAIKEYRKVLNALLKKYGKVHKINIELAREVGKNYSQRAKIEKEQNENYKAKKDAELECEKLGLKINSKNILKLRLFKEQKEFCVYSGEKIKISDLQDEKMLEIDHIYPYSRSFDDSYMNKVLVFTKQNQEKLNQTPFEAFGNDSAKWQKIEVLAKNLPTKKQKRILDKNYKDKEQKDFKDRNLNDTRYIARLVLNYTKDYLDFLPLSDDENTKLNDTQKGSKVYVEAKSGMLTSALRHTWGFSTKDRNNHLHHAIDAVIIAYANNSIVKAFSDFKKEQESNSAELYAKKISELDYKNKRKFFEPFSGFRQKVLDKIDEIFVSKPERKKPSGALHEETFRKEEEFYQSYGGKEGVLKALELGKIRKVNGKIVKNGDMFRVDIFKHKKTNKFYAVPIYTMDFALKVLPNKAVARSKKGEIKDWILMDENYEFCFSLYKDSLILIQTKDMQEPEFVYYNAFTSSTVSLIVSKHDNKFETLSKNQKILFKNANEKEVIAKSIGIQNLKVFEKYIVSALGEVTKAEFRQREDFKK

SEQ ID NO: 895 - protein, 984 aa, Campylobacter jejuni
MARILAFDIGISSIGWAFSENDELKDCGVRIFTKVENPKTGESLALPRRLARSARKRLARRKARLNHLKHLIANEFKLNYEDYQSFDESLAKAYKGSLISPYELRFRALNELLSKQDFARVILHIAKRRGYDDIKNSDDKEKGAILKAIKQNEEKLANYQSVGEYLYKEYFQKFKENSKEFTNVRNKKESYERCIAQSFLKDELKLIFKKQREFGFSFLKKFEEEVLSVAFYKRALKDFSHLVGNCSFFTDEKRAPKNSPLAFMFVALTRIINLLNNLKNTEGILYTKDDLNALLNEVLKNGTLTYKQTKKLLGLSDDYEFKGEKGTYFIEFKKYKEFIKALGEHNLSQDDLNEIAKDITLIKDEIKLKKALAKYDLNQNQIDSLSKLEFKDHLNISFKALKLITPLMLEGKKYDEAYNELNLKVAINEDKKDFLPAFNETYYKDEVTNPVVLRAIKEYRKVLNALLKKYGKVHKINIELAREVGKNHSQRAKIEKEQNENYKAKKDAELECEKLGLKINSKNILKLRLFKEQKEFCAYSGEKIKISDLQDEKMLEIDHIYPYSRSFDDSYMNKVLVFTKQNQEKLNQTPFEAFGNDSAKWQKIEVLAKNLPTKKQKRILDKNYKDKEQKDFKDRNLNDTRYIARLVLNYTKDYLDFLPLSDDENTKLNDTQKGSKVHVEAKSGMLTSALRHTWGFSAKDRNNHLHHAIDAVIIAYANNSIVKAFSDFKKEQESNSAELYAKKISELDYKNKRKFFEPFSGFRQKVLDKIDEIFVSKPERKKPSGALHEETFRKEEEFYQSYGGKEGVLKALELGKIRKVNGKIVKNGDMFRVDIFKHKKTNKFYAVPIYTMDFALKVLPNKAVARSKKGEIKDWILMDENYEFCFSLYKDSLILIQTKDMQEPELVYFNAFTSSTVSLIVSKHDNKFETLSKNQKILFKNANEKEVIAKSIGIQNLKVFEKYIVSALGEVTKAEFRQREDFKK

SEQ ID NO: 896 - protein, 984 aa, Campylobacter jejuni
MARILAFDIGISSIGWAFSENDELKDCGVRIFTKVENPKTGESLALPRRLARSARKRLARRKARLNHLKHLIANEFKLNYEDYQSFDESLAKAYKGSLISPYELRFRALNELLSKQDFARVILHIAKRRGYDDIKNSDDKEKGAILKAIKQNEEKLANYQSVGEYLYKEYFQKFKENSKEFTNVRNKKESYERCIAQSFLKDELKLIFKKQREFGFSFSKKFEEEVLSVAFYKRALKDFSHLVGNCSFFTDEKRAPKNSPLAFMFVALTRIINLLNNLKNTEGILYTKDDLNALLNEVLKNGTLTYKQTKKLLGLSDDYEFKGEKGTYFIEFKKYKEFIKALGEHNLSQDDLNEIAKDITLIKDEIKLKKALAKYDLNQNQIDSLSKLEFKDHLNISFKALKLITPLMLEGKKYDEACNELNLKVAINEDKKDFLPAFNETYYKDEVTNPVVLRAIKEYRKVLNALLKKYGKVHKINIELAREVGKNHSQRAKIEKEQNENYKAKKDAELECEKLGLKINSKNILKLRLFKEQKEFCAYSGEKIKISDLQDEKMLEIDHIYPYSRSFDDSYMNKVLVFTKQNQEKLNKTPFEAFGNDSAKWQKIEVLAKNLPTKKQKRILDKNYKDKEQKDFKDRNLNDTRYIARLVLNYTKDYLDFLPLSNDENTKLNDTQKGSKVHVEAKSGMLTSALRHTWGFSTKDRNNHLHHAIDAVIIAYANNSIVKAFSDFKKEQESNSAELYAKKISELDYKNKRKFFEPFSGFRQKVLDKIDEIFVSKPERKKPSGALHEETFRKEEEFYQSYGGKEGVLKALELGKIRKVNGKIVKNGDMFRVDIFKHKKTNKFYAVPIYTMDFALKVLPNKAVARSKKGEIKDWILMDENYEFCFSLYKDSLILIQTKDMQEPEFVYYNAFTSSTVSLIVSKHDNKFETLSKNQKILFKNANEKEVIAKSIGIQNLKVFEKYIVSALGEVTKAEFRQREDFKK

SEQ ID NO: 897 - protein, 984 aa, Campylobacter jejuni
MARILAFDIGISSIGWAFSENDELKDCGVRIFTKVENPKTGESLALPRRLARSARKRLARRKARLNHLKHLIANEFKLNYEDYQSFDESLAKAYKGSLISPYELRFRALNELLSKQDFARVILHIAKRRGYDDIKNSDDKEKGAILKAIKQNEEKLANYQSVGEYLYKEYFQKFKENSKEFTNVRNKKESYERCIAQSFLKDELKLIFKKQREFGFSFSKKFEEEVLSVAFYKRALKDFSHLVGNCSFFTDEKRAPKNSPLAFMFVALTRIINLLNNLKNTEGILYTKDDLNALLNEVLKNGTLTYKQTKKLLGLSDDYEFKGEKGTYFIEFKKYKEFIKALGEHNLSQDDLNEIAKDITLIKDEIKLKKALAKYDLNQNQIDSLSKLEFKDHLNISFKALKLITPLMLEGKKYDEACNELNLKVAINEDKKDFLPAFNETYYKDEVTNPVVLRAIKEYRKVLNALLKKYGKVHKINIELAREVGKNHSQRAKIEKEQNENYKAKKDAELECEKLGLKINSKNILKLRLFKEQKEFCAYSGEKIKISDLQDEKMLEIDHIYPYSRSFDDSYMNKVLVFTKQNQEKLNKTPFEAFGNDSAKWQKIEVLAKNLPTKKQKRILDKNYKDKEQKDFKDRNLNDTRYIARLVLNYTKDYLDFLPLSDDENTKLNDTQKGSKVHVEAKSGMLTSALRHTWGFSTKDRNNHLHHAIDAVIIAYANNSIVKAFSDFKKEQESNSAELYAKKISELDYKNKRKFFEPFSGFRQKVLDKIDEIFVSKPERKKPSGALHEETFRKEEEFYQSYGGKEGVLKALELGKIRKVNGKIVKNGDMFRVDIFKHKKTNKFYAVPIYTMDFALKVLPNKAVARSKKGEIKDWILMDENYEFCFSLYKDSLILIQTKDMQEPEFVYYNAFTSSTVSLIVSKHDNKFETLSKNQKILFKNANEKEVIAKSIGIQNLKVFEKYIVSALGEVTKAEFRQREDFKK

SEQ ID NO: 898 - protein, 984 aa, Campylobacter jejuni
MARILAFDIGISSIGWAFSENDELKDCGVRIFTKVENPKTGESLALPRRLARSARKRLARRKARLNHLKHLIANEFKLNYEDYQSFDESLAKAYKGSLISPYELRFRALNELLSKQDFARVILHIAKRRGYDDIKNSDDKEKGAILKAIKQNEEKLANYQSVGEYLYKEYFQKFKENSKEFTNVRNKKESYERCIAQSFLKDELKLIFKKQREFGFSFSKKFEEEVLSVAFYKRALKDFSHLVGNCSFFTDEKRAPKNSPLAFMFVTLTRIINLLNNLKNTEGILYTKDDLNALLNEVLKNGTLTYKQTKKLLGLSDDYEFKGEKGTYFIEFKKYKEFIKALGEHNLSQDDLNEIAKDITLIKDEIKLKKALAKYDLNQNQIDSLSKLEFKDHLNISFKALKLITPLMLEGKKYDEACNELNLKVAINEDKKDFLPAFNETYYKDEVTNPVVLRAIKEYRKVLNALLKKYGKVHKINIELAREVGKNHSQRAKIEKEQNENYKAKKDAELECEKLGLKINSKNILKLRLFKEQKEFCAYSGEKIKISDLQDEKMLEIDHIYPYSRSFDDSYMNKVLVFTKQNQEKLNKTPFEAFGNDSAKWQKIEVLAKNLPTKKQKRILDKNYKDKEQKDFKDRNLNDTRYIARLVLNYTKDYLDFLPLSDDENTKLNDTQKGSKVHVEAKSGMLTSALRHTWGFSTKDRNNHLHHAIDAVIIAYANNSIVKAFSDFKKEQESNSAELYAKKISELDYKNKRKFFEPFSGFRQKVLDKIDEIFVSKPERKKPSGALHEETFRKEEEFYQSYGGKEGVLKALELGKIRKVNGKIVKNGDMFRVDIFKHKKTNKFYAVPIYTMDFALKVLPNKAVARSKKGEIKDWILMDENYEFCFSLYKDSLILIQTKDMQEPEFVYYNAFTSSTVSLIVSKHDNKFETLSKNQKILFKNANEKEVIAKSIGIQNLKVFEKYIVSALGEVTKAEFRQREDFKK

SEQ ID NO: 899 - protein, 984 aa, Campylobacter jejuni
MARILAFDIGISSIGWAFSENDELKDCGVRIFTKVENPKTGESLALPRRLARSARKRLARRKARLNHLKHLIANEFKLNYEDYQSFDESLAKAYKGSLISPYELRFRALNELLSKQDFARVILHIAKRRGYDDIKNSDDKEKGAILKAIKQNEEKLANYQSVGEYLYKEYFQKFKENSKEFTNVRNKKESYERCIAQSFLKDELKLIFKKQREFGFSFSKKFEEEVLSVAFYKRALKDFSHLVGNCSFFTDEKRAPKNSPLAFMFVALTRIINLLNNLKNTEGILYTKDDLNALLNEVLKNGTLTYKQTKKLLGLSDDYEFKGEKGTYFIEFKKYKEFIKALGEHNLSQDDLNEIAKDITLIKDEIKLKKALAKYDLNQNQIDSLSKLEFKDHLNISFKALKLITPLMLEGKKYDEACNELNLKVAINEDKKDFLPAFNETYYKDEVTNPVVLRAIKEYRKVLNALLKKYGKVHKINIELAREVGKNHSQRAKIEKEQNENYKAKKDAELECEKLGLKINSKNILKLRLFKEQKEFCAYSGEKIKISDLQDEKMLEIDHIYPYSRSFDDSYMNKVLVFTKQNQEKLNKTPFEAFGNDSAKWQKIEVLAKNLPTKKQKRILDKNYKDKEQKDFKDRNLNDTRYIARLVLNYTKDYLDFLPLSDDENTKLNDTQKGSKVHVEAKSGMLTSALRHTWGFSTKDRNNHLHHAIDAVIIAYANNSIVKAFSDFKKEQESNSAELYAKKISELDYKNKRKFFEPFSGFRQKVLDKIDEIFVSKPERKKPSGALHEETFRKEEEFYQSYGGKEGVLKALELGKIRKVNGKIVKNGDMFRVDIFKHKKTNKFYAVPIYTMDFALKVLPNKAVARSKKGEIKDWILMDENYEFCFSLYKDSLILIQTKDMQEPEFVYYNAFTSSTVSLIVSKHDNKFETLSKNQKILFKNANEKEVIAKSIGIQNLKVFEKYIVSALGEVTKAEFIQREDFKK

SEQ ID NO: 900 - protein, 987 aa, Campylobacter jejuni
MARILAFDIGISSIGWAFSENDELKDCGVRIFTKVENPKTGESLALPRRLARSARKRLARRKARLNHLKHLIANEFKLNYEDYQSFDESLAKAYKGSLISPYELRFRALNELLSKQDFARVILHIAKRRGYDDIKNSDDKEKGAILKAIKQNEEKLANYQSVGEYLYKEYFQKFKENSKEFTNVRNKKESYERCIAQSFLKDELKLIFKKQREFGFSFSKKFEEEVLSVAFYKRALKDFSHLVGNCSFFTDEKRVPKNSPLAFMFVALTRIINLLNNLKNTEGILYTKDDLNALLNEVLKNGTLTYKQTKKLLGLSDDYEFKGEKGTYFIEFKKYKEFIKALGEHNLSQDDLNEIAKDITLIKDEIKLKKALAKYDLNQNQIDSLSKLEFKDHLNISFKALKLITPLMLEGKKYDEACNELNLKVAINEDKKDFLPAFNETYYKDEVTNPVVLRAIKEYRKVLNALLKKYGKVHKINIELAREVGKNHSQRAKIEKEQNENYKAKKDAELECEKLGLKINSKNILKLRLFKEQKEFCAYSGEKIKISDLQDEKMLEIDHIYPYSRSFDDSYMNKVLVFTKQNQEKLNQTPFEAFGNDSAKWQKIEVLAKNLPTKKQKRILDKNYKDKEQKNFKDRNLNDTRYIARLVLNYTKDYLDFLPLSDDENTKLNDTQKGSKVHVEAKSGMLTSALRHTWGFSAKDRNNHLHHAIDAVIIAYANNSIVKAFSDFKKEQESNSAELYAKKISELDYKNKRKFFEPFSGFRQKVLDKIDEIFVSKPERKKPSGALHEETFRKEEEFYQSYGGKEGVLKALELGKIRKVNGKIVKNGDMFRVDIFKHKKTNKFYGVPIYTMDFALKVLPNKAVARSKKGEIKDWILMDENYEFCFSLYKDSLILIQTKDMQEPEFVYYNAFTSSTVSLIVSKHDNKFETLSKNQKILFKNANEKEVIAKSIGIQNLKVFEKYIVSALGEVTKAEFRQREDFKNELR

SEQ ID NO: 901 - protein, 984 aa, Campylobacter jejuni
MARILAFDIGISSIGWAFSENDELKDCGVRIFTKVENPKTGESLALPRRLARSARKRLARRKVRLNHLKHLIANEFKLNYEDYQSFDESLAKAYKGSLISPYELRFRALNELLSKQDFARVILHIAKRRGYDDIKNSDDKEKGAILKAIKQNEEKLANYQSVGEYLYKEYFQKFKENSKEFTNVRNKKESYERCIAQSFLKDELKLIFKKQREFGFSFSKKFEEEVLSVAFYKRALKDFSHLVGNCSFFTDEKRAPKNSPLAFMFVALTRIINLLNNLKNTEGILYTKDDLNALLNEVLKNGTLTYKQTKKLLGLSDDYEFKGEKGTYFIEFKKYKEFIKALGEHNLSQDDLNEIAKDITLIKDEIKLKKALAKYDLNQNQIDSLSKLEFKDHLNISFKALKLITPLMLEGKKYDEACNELNLKVAINEDKKDFLPAFNETYYKDEVTNPVVLRAIKEYRKVLNALLKKYGKVHKINIELAREVGKNHSQRAKIEKEQNENYKAKKDAELECEKLGLKINSKNILKLRLFKEQKEFCAYSGEKIKISDLQDEKMLEIDHIYPYSRSFDDSYMNKVLVFTKQNQEKLNKTPFEAFGNDSAKWQKIEVLAKNLPTKKQKRILDKNYKDKEQKDFKDRNLNDTRYIARLVLNYTKDYLDFLPLSDDENTKLNDTQKGSKVHVEAKSGMLTSALRHTWGFSTKDRNNHLHHAIDAVIIAYANNSIVKAFSDFKKEQESNSAELYAKKISELDYKNKRKFFEPFSGFRQKVLDKIDEIFVSKPERKKPSGALHEETFRKEEEFYQSYGGKEGVLKALELGKIRKVNGKIVKNGDMFRVDIFKHKKTNKFYAVPIYTMDFALKVLPNKAVARSKKGEIKDWILMDENYEFCFSLYKDSLILIQTKDMQEPEFVYYNAFTSSTVSLIVSKHDNKFETLSKNQKILFKNANEKEVIAKSIGIQNLKVFEKYIVSALGEVTKAEFRQREDFKK

SEQ ID NO: 902 - protein, 721 aa, Campylobacter jejuni
MFVALTRIINLLNNLKNTEGILYTKDDLNTLLNEVLKNGTLTYKQTKKLLGLSDDYEFKGEKGTYFIEFKKYKEFIKALGDHSLSQDDLNEIAKDITLIKDEIKLKKALAKYDLNQNQIDSLSKLEFKDHLNISFKALKLITPLMLEGKKYDEACNELNLKVAINEDKKDFLPAFNETYYKDEVTNPVVLRAIKEYRKVLNALLKKYGKVHKINIELAREVGKNYSQRAKIEKEQNENYKAKKDAELECEKLGLKINSKNILKLRLFKEQKEFCAYSGEKIKISDLQDEKMLEIDHIYPYSRSFDDSYMNKVLVFTKQNQEKLNQTPFEAFGNDSAKWQKIEVLAKNLPTKKQKRILDKNYKDKEQKDFKDRNLNDTRYIARLVLNYTKDYLDFLPLSDDENTKLNNTQKGSKVYVEAKSGMLTSALRHTWGFSTKDRNNHLHHAIDAVIIAYANNSIVKAFSDFKKEQESNSAELYAKKISELDYKNKRKFFEPFSGFRQKVLDKIDEIFVSKPERKKPSGALHEETFRKEEEFYQSYGGKEGVLKALELGKIRKVNGKIVKNGDMFRVDIFKHKKTNKFYAVPIYTMDFALKVLPNKAVARSKKGEIKDWILMDENYEFCFSLYKDSLILIQTKDMQEPEFVYYNAFTSSTVSLIVSKHDNKFETLSKNQKILFKNANEKEVIAKSIGIQNLKVFEKYIVSALGEVTKAEFRQREDFKK

SEQ ID NO: 903 - protein, 512 aa, Campylobacter jejuni
MHKINIELAREVGKNHSQRAKIEKEQNENYKAKKDAEIECEKLGLKINSKNILKLRLFKEQKEFCAYSGEKIKLSDLQDEKMLEIDHIYPYSRSFDDSYMNKVLVFTKQNQEKLNKTPFEAFGNDSTKWQKIEVLAKNLPEKKQKRILDKNYKDKEQKDFKDRNLNDTRYIARLVLNYTKDYLDFLPLSDDENTKLNDTQKGSKVHVEAKSGMLTSALRHTWGFSAKDRNNHLHHAIDAAIIAYANNSIVKAFSDFKKEQESNSVELYAKKISELDYKNKRKFFEPFSGFRQKVLDKIDEIFVSKPERKKPSGALHEETFRKEEEFYQSYGGKEGVLKALELGKIRKVNGKIVKNGDMFRVDIFKHKKTNKFYAVPIYTMDFALKVLPNKAVARSKKGEIKDWILMDENYEFCFSLYKDSLILIQTKDMQEPELVYFNAFTSSTVSLIVSKHDNKFETLSKNQKILFKNANEKEVIAKSIGIQNLKVFEKYIVSALGEVTKAEFRQREDFKK

SEQ ID NO: 904 - protein, 965 aa, Campylobacter jejuni
MKIIGFNLGIANIGWALRENDEIIDCGVRVFDIPENPKNGNSLALERRENKARMKIVKRKKARMLATKTFLKKELNVDLSKLFLIGSTQSIYELRAKALSSLISKEELSAIILHIAKHRGYDDSALKNENGTIIEALNKNKETMLKFKSVGEYFYKNFVQNKEVKKIRNTTEDYSNSVPRSLLKQELDLILDKQKELGLIKNADFKEKLFEIIFFKRPLKDFSNKIGNCIFFENEKRAAKNTISACEFVALGKVVNLLKSIEKDIGIVYEKDSINEIMSIILDKTSISYKKIRDILNLPQEINFKGLDYSKNNVENSKLVDLKKLNEFKKALGDGFANLDKDILDSIATDITLTKDTATLKEKLKNYNVLNAEQIEKLSELVFNDHINLSLKALKQIIPLMYEGKRYDEACELCNFTIAKNQEKSEYLPLFEKTRFAKDISSPVVIRAICEFRKLLNDIIRRYGSVHKIHLELTRDFGISFSDRKKIIKEIEQNEQSRIKALETIKELKLEETSKNIQIVRLFEDQKGICPYSGLKMDLNRLDELVIDYIRPYNRSLDDSYSNKVLTFKKLSDLKQGKTPFEAFGEDEKLWAEINERIKEYNGKKRFKIFDKFFKDKKPFDFTEQTLQDTRWLTKLVASYLNEYLSFLPISEDENTALGYGEKGSKQHVILSSGMITQMLRNFWYLGFKNHKDYKNNAMDAIIVAFTTNSIIFAFNNFKKELDLAKAEFYANKISESDYLLKRKFLPPFSGFKEQALEKVKNIFVSHSLKIKNKGTLHDLTPLKIKELKNTYGDLDLAVKLGKIRKYNDKYYANANGSLVRADLFVDKKNKFHAVSIYKADFSTKKLPNKTPATTSNGETKEGIEMNENYNFCMSLYKNTPISVKIKGMKEPIICYYHGFNTSGSKITYKKHDNNYHNLSEDEMVVFRKNDKESIAVGKILEIKKYSISPSGELSLIENEERKWF

SEQ ID NO: 905 - protein, 759 aa, Campylobacter jejuni
MLSVAFYKRALKDFSHLVGNCSFFTDEKRAPKNSPLAFMFVALTRIINLLNNLKNTEGILYTKDDLNALLNEVLKNGTLTYKQTKKLLGLSDDYEFKGEKGTYFIEFKKYKEFIKALGEHNLSQDDLNEIAKDITLIKDEIKLKKALAKYDLNQNQIDSLSKLEFKDHLNISFKALKLITPLMLEGKKYDEACNELNLKVAINEDKKDFLPAFNETYYKDEVTNPVVLRAIKEYRKVLNALLKKYGKVHKINIELAREVGKNHSQRAKIEKEQNENYKAKKDAELECEKLGLKINSKNILKLRLFKEQKEFCAYSGEKIKISDLQDEKMLEIDHIYPYSRSFDDSYMNKVLVFTKQNQEKLNKTPFEAFGNDSAKWQKIEVLAKNLPTKKQKRILDKNYKDKEQKDFKDRNLNDTRYIARLVLNYTKDYLDFLPLSDDENTKLNDTQKGSKVHVEAKSGMLTSALRHTWGFSTKDRNNHLHHAIDAVIIAYANNSIVKAFSDFKKEQESNSAELYAKKISELDYKNKRKFFESFSGFRQKVLDKIDEIFVSKPERKKPSGALHEETFRKEEEFYQSYGGKEGVLKALELGKIRKVNGKIVKNGDMFRVDIFKHKKTNKFYAVPIYTMDFALKVLPNKAVARSKKGEIKDWILMDENYEFCFSLYKDSLILIQTKDMQEPEFVYYNAFTSSTVSLIVSKHDNKFETLSKNQKILFKNANEKEVIAKSIGIQNLKVFEKYIVSALGEVTKAEFRQREDFKK

SEQ ID NO: 906 - protein, 984 aa, Campylobacter jejuni
MVRILAFDIGISSIGWAFSENDELKDCGVRIFTKVENPKTGESLALPRRLARSARKRLARRKARLNHLKHLIANEFKLNYEDYQSFDESLAKAYKGSLISPYELRFRALNELLSKQDFARVILHIAKRRGYDDIKNSDDKEKGAILKAIKQNEEKLANYQSVGEYLYKEYFQKFKENSKEFTNVRNKKESYERCIAQSFLKDELKLIFKKQREFGFSFSKKFEEEVLSVAFYKRALKDFSHLVGNCSFFTDEKRAPKNSPLAFMFVALTRIINLLNNLKNTEGILYTKDDLNALLNEVLKNGTLTYKQTKKLLGLSDDYEFKGEKGTYFIEFKKYKEFIKALGEHNLSQDDLNEIAKDITLIKDEIKLKKALAKYDLNQNQIDSLSKLEFKDHLNISFKALKLITPLMLEGKKYDEACNELNLKVAINEDKKDFLPAFNETYYKDEVTNPVVLRAIKEYRKVLNALLKKYGKVHKINIELAREVGKNHSQRAKIEKEQNENYKAKKDAELECEKLGLKINSKNILKLRLFKEQKEFCAYSGEKIKISDLQDEKMLEIDHIYPYSRSFDDSYMNKVLVFTKQNQEKLNKTPFEAFGNDSAKWQKIEVLAKNLPTKKQKRILDKNYKDKEQKDFKDRNLNDTRYIARLVLNYTKDYLDFLPLSDDENTKLNDTQKGSKVHVEAKSGMLTSALRHTWGFSTKDRNNHLHHAIDAVIIAYANNSIVKAFSDFKKEQESNSAELYAKKISELDYKNKRKFFEPFSGFRQKVLDKIDEIFVSKPERKKPSGALHEETFRKEEEFYQSYGGKEGVLKALELGKIRKVNGKIVKNGDMFRVDIFKHKKTNKFYAVPIYTMDFALKVLPNKAVARSKKGEIKDWILMDENYEFCFSLYKDSLILIQTKDMQEPEFVYYNAFTSSTVSLIVSKHDNKFETLSKNQKILFKNANEKEVIAKSIGIQNLKVFEKYIVSALGEVTKAEFRQREDFKK

SEQ ID NO: 907 - protein, 1003 aa, Campylobacter lari
MRILGFDIGINSIGWAFVENDELKDCGVRIFTKAENPKNKESLALPRRNARSSRRRLKRRKARLIAIKRILAKELKLNYKDYVAADGELPKAYEGSLASVYELRYKALTQNLETKDLARVILHIAKHRGYMNKNEKKSNDAKKGKILSALKNNALKLENYQSVGEYFYKEFFQKYKKNTKNFIKIRNTKDNYNNCVLSSDLEKELKLILEKQKEFGYNYSEDFINEILKVAFFQRPLKDFSHLVGACTFFEEEKRACKNSYSAWEFVALTKIINEIKSLEKISGEIVPTQTINEVLNLILDKGSITYKKFRSCINLHESISFKSLKYDKENAENAKLIDFRKLVEFKKALGVHSLSRQELDQISTHITLIKDNVKLKTVLEKYNLSNEQINNLLEIEFNDYINLSFKALGMILPLMREGKRYDEACEIANLKPKTVDEKKDFLPAFCDSIFAHELSNPVVNRAISEYRKVLNALLKKYGKVHKIHLELARDVGLSKKAREKIEKEQKENQAVNAWALKECENIGLKASAKNILKLKLWKEQKEICIYSGNKISIEHLKDEKALEVDHIYPYSRSFDDSFINKVLVFTKENQEKLNKTPFEAFGKNIEKWSKIQTLAQNLPYKKKNKILDENFKDKQQEDFISRNLNDTRYIATLIAKYTKEYLNFLLLSENENANLKSGEKGSKIHVQTISGMLTSVLRHTWGFDKKDRNNHLHHALDAIIVAYSTNSIIKAFSDFRKNQELLKARFYAKELTSDNYKHQVKFFEPFKSFREKILSKIDEIFVSKPPRKRARRALHKDTFHSENKIIDKCSYNSKEGLQIALSCGRVRKIGTKYVENDTIVRVDIFKKQNKFYAIPIYAMDFALGILPNKIVITGKDKNNNPKQWQTIDESYEFCFSLYKNDLILLQKKNMQEPEFAYYNDFSISTSSICVEKHDNKFENLTSNQKLLFSNAKEGSVKVESLGIQNLKVFEKYIITPLGDKIKADFQPRENISLKTSKKYGLR

SEQ ID NO: 908 - protein, 372 aa, Unknown
  Description of Unknown: Candidate division polypeptide
DNESAINQIAYILTTQKADEGIRAELDSLPLSDKAKKAIVKIKPTNFKAFGHLSIKALQKITPHILEGMTYDKACEAAGYDFKKQSASLEQITNPVVKRAITQTLKVVRAIERKYGKPYFIKVETARDLAKNFKDRNAIKKENEENQGYNEDIKSIITNGYEASPKTKGGKQLLNHLKEFNVRLNKNADFNGQQIIKVKLYREQQGKCLYSGNPIDFETMLRDDNAYQVDHIVPFSRSNNDGITNKVLVFTEENQKKADRTPFEYFGTDERRWEKFVALVETTYKTRDVKTSDKATNAINYEYNGYAMKKKQNLLLQDYKNDSWNVRALNDTRYITRFIQNYLRQNVDFAEGEEKQRIIAPNGTTTAYLRKR

SEQ ID NO: 909 - protein, 1117 aa, Capnocytophaga ochracea
MKHILGLDLGSNSIGWAFVQQDFENKQGKIIATGSRIIPMDQGILGDFERGNTVSQTAERTTYRSMRRLRERHLLRRERLHRVLHLLGFLPPHYDAQIDFTKRYGKFIDNAEPKIAYNNGNFIFMNSFNEMVEDFKKHQPQLFYKKSNGEESRIPYDWTIYYLRKKALSQKITQQELAWLILHFNQKRGYYQLRGEEETENPNKEVAFHSLKVVDVEAEAPNKKGEIWYTIRLENGWIYRRTSKNPLDDWKGKTRDFIVTTDLNDDGTIKLDKEGKEKRSFRAPDENDWNLLKKKTEHDIDFSGKPVGTYIYDHLLQNPNQKIKGKLVRTIERKYYKDELKAILAKQIALQPELFTETLLADCIRELYRKNETQQQNLLSKDFLHLFVEDIIFYQRPLCSKKSTIANCTLEKRSYIDKETNERKDAPIKVCAKSNPYYQEFRVLQWLQNLRIYEIETDREVTAEFIETPQDYEALFNFLMSQKEIDNEGLLKYFLFAKNPQIKDKAAKSELKKWLTTYRWNYVYDAADNSSKKYPMNETGYELQRYLQKVEGLPANFLTFDITYQLWHLLYSVKDKVEFEKALKKFAKKKQLDKTSFVDSFKNFKPYPNEYGSFSEKAIKKLLPLMRFGNHWDFNRIDVSTQKRIDDLINGVANEDIRTIIREKAEKYQLNSETCFQDLPLWLAQYVVYNRHAEATDIEKWTSVSDLEAYLEDFKQHSLRNPIVEQVVTETLRVVRDIWQQYSGGQANFFDEIHIELGRELKKTAEERKQLSDKNQENENTNLRIKKLLAELKEDASIQNVRPYSLVQQELLKIYEEGVFSSTDEIEEDIQKIRKKVEPTPPEIQRYKLWLEQKYKSPYTGEVISLTKLFTEEYEIEHIIPQSRYYDDSLSNKVICESAVNKLKTNQLGLEFIQNHHGEKVRITANKEVTIFTEEQYKEFVKKHYANNSAKQQKLLLNEIPEKMVARQLNDTRYISKCISEILSKIVRSDEKDEGVNSKNIIPCTGKITTALKQDWGLNDVWNELILPRFERMNQLTQTQLFTSYNDRLQKNLPTVPIEYSQGFQKKRIDHRHHAMDALVIACATREHINYMNNQHALDKSKDKKEKQQSRIDLHPL

SEQ ID NO: 910 - protein, 303 aa, Capnocytophaga ochracea
MSFKQNLRVINKATNYYEKWEEKNGVLVKKKVKQEGTNWAIRKPLHKETVSGKIVLDRKIGKDKILTATRKAVDITFTEKIISSITDTGIQKILLNYLKYKGSPEVAFSAEGLEELNKNIAQYNDGKKHQPIYKVRIFEEGSKFPLGETGAKATKYVEAAKGTNLFFGVYQGKEKRTYATIPLNEVIERQKQGLPSVPERNEKGEPLLFSLSPNDLVYVPMEGEIAETIDFNNLSKEQKERIYKTVSFTGNQCFFVQEAVASPIVNKMEYSPLNKMERDILGIMIKEVCVKLKVDRLGNIIKA

SEQ ID NO: 911 - protein, 1471 aa, Capnocytophaga sp.
MCKYFYIKNFITFVLSKSIIPMKHILGLDLGSNSIGWAFVQQDFENKQGKIIATGSRIIPMDQGILGDFERGNTVSQTAERTTYRSTRRLRERHLLRRERLHRVLHILGFLPPHYDAQIDFTKRYGKFIDNAEPKIAYNNGNFIFMNSFNEMIEDFKKHQPQLFYKKSNGEESKIPYDWTIYYLRKKALSQKITQQELAWLILHFNQKRGYYQLRGEEETENPNKEVAFHSLKVVDVEAEAPNKKGEIWYTIRLENGWIYRRTSKIPLDDWKGKTRDFIVTTDLNDDGTIKVDKEGKEKRSFRAPDENDWNLLKKKTEHDIDFSGKTVGAYIYDHLLQNPNQKIKGKLVRTIERKYYKDELKAILAKQIALQPELFTETLLADCIRELYRKNETQQQNLLSKDFLHLFVEDIIFYQRPLRSKKSTIANCTLEKRSYIDKETNERKDAPIKVCAKSNPYYQEFRVLQWLQNLRIYEIETDREVTAEFIETPQDCEALFNFLMSQKEIDNKGLLKYFLFAKNPQIKDKAAKSELKKWLTTYRWNYVYDAADNSSKKYPMNETGYELQRYLQKVEGLPANFLTFDITYQLWHLLYSVKDKVEFEKALKKFAKKKQLDKTSFVDSFKNFKPYPNEYGSFSEKAIKKLLPLMRFGNHWDFNRIDVSTQKRIDDLINGVANEDIRTIIREKAEKYQLNSETCFQDLPLWLAQYVVYNRHAEATDIEKWTSVSDLEAYLEDFKQHSLRNPIVEQVVTETLRVVRDIWQQYGGGQANFFDEIHIELGRELKKTAEERKQLSDKNQENESTNLRIKKLLAELKEDASIQNVRPYSLVQQELLKIYEEGVFSATDEVEEDIQKIRKKAEPSKADLQRYKLWLEQKYKSPYTGEVISLTKLFTEEYEIEHIIPQSRYYDDSLSNKVICESAVNKLKTNQLGLEFIQNHHGEKVRITANKEVTIFTEEQYKEFVKKHYANNSAKQQKLLLNEIPEKMVARQLNDTRYISKYISEILSKIVRSDEKDEGVNSKNIIPCTGKITTALKQDWGLNDVWNKLILPRFERMNQLTQTQLFTSYNDRLQKNLPTVPIEYSQGFQKKRIDHRHHAMDALVIACATREHINYMNNQHALDKSKDKKEKQQSRIDLRTILCEKKNNNWQFKKPWSTFTQEAKEALEHIVVSFKQNLRVINKATNYYEKWEEKNGVLVKKKVKQEGTNWAIRKPLHKETVSGKIVLDRKIGKDKILTATRKAVDITFTEKIISSITDTGIQKILLNYLKYKGSPEVAFSTEGLEELNKNIAQYNNGKKHQPIYKVRIFEEGSKFPLGETGAKATKYVEAAKGTNLFFGVYQGKGKRTYATIPLNEVIERQKQGLPSVPERNEKGEPLLFSLSPNDLVYVPMEGEIAETIDFNNLSKEQKERIYKTVSFTGNQCFFVQEAVATPIVNKMEYSPLNKMERDILGTMIKEVCIKLKVDRLGNITKA

SEQ ID NO: 912 - protein, 1450 aa, Capnocytophaga sp.
MKHILGLDLGSNSIGWAFVQQDFENKQGKIIATGSRIIPMDQGILGDFERGNTVSQTAERTTYRNTRRLRERHLLRRERLHRVLHILGFLPPHYDSQIDFTKRYGKFIDNAEPKIAYNNGNFIFMNSFNEMIEDFKKYQPQLFYKKSNGEESKIPYDWTIYYLRKKALSQKITQQELAWLILHFNQKRGYYQLRGEEETENPNKEVAFHSLEVVDVEAEAPNKKGEIWYTIRLENGWIYRRTSKIPLDDWKGKTRDFIVTTDLNDDGTIKLDKEGKEKRSFRAPDENDWNLLKKKTEHDIDFSGKTVGAYIYDHLLQNPNQKIKGKLVRTIERKYYKDELKAILAKQIALQPELFTETLLADCIRELYRKNETQQQNLLSKDFLHLFVEDIIFYQRPLRSKKSTIANCTLEKRSYIDKETNERKDTPIKVCAKSNPYYQEFRVLQWLQNLRIYEIETDREVTAEFIETAQDNEALFNFLMSQKEIDNESLLKYFLFAKNPQIKDKVAKSELKKWLTTYRWNYVYDAADNSSKKYPMNETGYELQQYLQKVEGLPANFLTFDITYRLWHLLYSVKDKVEFEKALKKFAQEYQLDEASFVDSFKNFKPYPNEYGSFSEKAIKKLLPLMRFGNHWDFNRIDVSTQKRIDDLINGVANDEIRTIIREKAEKYQLNSETCFQGLPLWLAQYVVYNRHAEAADIEKWTSVNDLEAYLEDFKQHSLRNPIVEQVITETLRVVRDIWQRYGGGQANFFDEIHIELGRELKKTAEERKQLSNRNQENENTNLRIKKLLAELKEDASIQNVRPYSPVQQELLKIYEEGVFSATDEVEEDIQKIRKKAEPTTPEIQRYKLWLEQKYKSPYTGEVISLTKLFTEEYEIEHIIPQSRYYDDSLSNKVICESAVNKLKTNQLGLEFIQNHHGEKVRITANKEVTIFTEEQYKEFVKKHYANNSAKQQKLLLNEIPEKMVARQLNDTRYISKYISEILSKIVRSDEKDEGVNSKNIIPCTGKITTALKQDWGLNDVWNELILPRFERMNQLTQTQLFTSYNDRFQKNLPTVPIEYSQGFQKKRIDHRHHAMDALVIACATREHINYMNNQHALDKSKDKKEKQQSRIDLRTILCEKKNNNWQFKKPWSTFTQEAQEALEHIVVSFKQNLRVINKATNYYEKWEEKNGVLVKKKVKQEGTNWAIRKPLHKETVSGKIVLDRKIGKDKILTATRKSVDITFTEKIISSITDTGIQKILLNYLKYKGSPEVAFSAEGLEELNKNIAQYNDGKKHQPIYKVRIFEEGSKFPLGETGAKATKYVEAAKGTNLFFGVYQGKGKRTYATIPLNEVIERQKQGLPSVPERNEKGEPLLFSLSPNDLVYVPMEGEIAETIDFNNLSKEQKERIYKTVSFTGNQCFFVQEAVATPIVNKIEYSPLNKMERDILGTMIKEVCIKLKVDRLGNITKA

SEQ ID NO: 913 - protein, 1435 aa, Capnocytophaga sp.
MKNILGLDLGTTSIGFAHIVEDENKEKSEIKELGVRIVSLATDEQSDFEKGKSISTNANRTLKHGARLNLDRYQQRRKFLIDLLQKANLITSASILAENGKNTTHSTWQLRAKAVTERIEKEEFARVLLAINKKRGYKNSRKTKTEDEGQAIDGMAIAKCLYDENLTPGQLSLQLLQQNKKLLPDFYRSDLQKEFDLVWNLQKQFYPDILTDSFYKELQGKGKDATSKAFSKRYHFDTAENKGSKESVRLQAYQWRAEAISKQLSKEEVAYVLTEINNNLNNSSGYLGAISDRSKELYFNRQTVGQYLYAQLQENRHNSLKNKVFYRQDYLDEFERIWETQASFHKELTDELKKQIRDVVIFYQRKLKSQKGLVSFCEFESKEIEIEKDGKAITKSIGARVVPKSSPLFQEFKIWQILNNVTCKRKGIRKKKSSAKSTELDLFNEPSQSIFSLDMECKQLLFDELNLKGDLKSDKVLKLLGYSPQEWEINYNQLEGNRTQKSLYEAYLKIIEIEGYEVKDILQIKSTKDDWSLDESPLSASEIRERVKVIFQTLGICTKILYFDPLLPVKEFEQQYSYQLWHLLYSYESDDSTSGNETLYRILEKKYAFKREHATILANVALQDDYGSLSTKAIRKIYPYIKENQYSTACELAGYKHSKLSLTTEELEARELKNIIPLLKKNALRNPVVEKILNQMINVVNALIEKNSERDAEGKITKYFHFDEIRIELARELKKNAQERYEMTQNINKAKLEHQKISEKLQKQFGIKNPTKSDIIRYRLYQELEHNGYKELYTNTYIAPDVLFSKNIDIEHIVPKARVFDDSFSNKTLAFKEFNIKKGESTAFDYITSLNCEGELNQYLTRVENAYKTKSISLTKYKNLLKKASEIGDGFINRDLRDTQYIAKKAKEILFQVTKNVLSTSGSITDRLREDWGLVDVMKELNMPKYQSLGLTEVEERKDGNKVTVIKDWTKRNDHRHHAMDALTVAFTKPSYIQYLNHLNARKDENNKNYSVILAIEKKETIKVPINNGKNKRVFIEPILNFRQVAKKHLEEIFISHKAKNKVVTKNINKPAGTDKQQITLTPRGQLHKETIYGKYQYYVNKEEKVGVKFDERTITKVSNPLYREALLKRLQANDNDPKKAFAGKNALSKNPIYLDEAKTKTLPEKVNLTYLEEDFSIRKDISPDNFKDLKSIEKVIDQGVKRILIKRLQAYDNDPKKAFVDLEKNPIWLNKEKGIAIKRVTISGVSNAQPLHIGKDHLGKTTLNKEGKEVPVDYVSTGNNHHVAIYRDKEGNLQEQIVSFFEAVVRAQQGLPIIDKNYKQAEGWQFMFTMKQNEMFVFPNEATGFNPAEIDLLDPKNKKLISPNLFRVQTISIVKYGNSVVRDFKFRHHLETTLQDDKILQGITFQQIKSLEPLRNIVKVRINHLGDIVNIGEY

SEQ ID NO: 914 - protein, 1432 aa, Capnocytophaga sp.
MKNILGLDLGTTSIGFAHIVEDENKEKSEIKELGVRIVSLTTDEQSDFEKGKSITTNANRTLKHGARLNLDRYQQRRKYLIDLLHKANLITPSSILAENGKNTTHSTWQLRAKAVTERIEKEEFARILLAINKKRGYKSSRKAKTEDEGQAIDGMAIAKRLYDENLTPGQLSLQLLQQNKKLLPDFYRSDLQKEFDLVWNFQKQFYPDILTDIFYKELQGKGKDATSKAFSKRYHFDTAENKGSKESVRLQAYQWRAEAVSKQLSKEEVAYVLTEINNNLNNASGYLGAISDRSKELYFNRQTVGQYLYAQLQENRHNSLKNKVFYRQDYLDEFERIWETQALFHKELTDELKKQIRDVVIFYQRKPKSQKGLISFCEFESKEIEIEKDGKTITKNIGARVVPKSSPLFQEFKIWQILNNVICKRKGIRKKKISAKTTQLDLLNESSQTIFSLDMECKQLLFDELNLKGDLKSDKVLKLLGYSPQEWEINYNQLEGNRTQKALYEAYLKIVEMEAHDVKDILQIKSTKDDWSLDESPLSASEIRESVKAIFQALGICTKILYFDPLLPVKDFEEQDSYQLWHLLYSYESDDSTSGNETLYRILEKKYAFKREHARILANVALQDDYGSLSTKAIRKIYPNIKENQYSTACEMAGYKHSKLSLTTEELEARELKNIIPLLKKNALRNPVVEKILNQMINVVNALIEKNSERDAEGKITKYFHFDEIRIELARELKKNAQKRYEMTQNINKAKSEHQKISEILQKEFGIKNPTKSDIIRYRLYKELEHNGYKELYTNTYIAPDVLFSKNIDIEHIVPKARVFDDSFSNKTLAFKDFNIKKGESTAFDYITSLKNEEKLNQYLARVENAYKTKNISPAKYKNLLKKASEIGDGFINRDLRDTQYIAKKAKEILFQVTKNVLSTSGSITDRLREDWSLVDVMKELNMPKYQSLGLTEVEERKDGNKVTVIKDWTKRNDHRHHAMDALTVAFTKPSYIQYLNHLNARKDENNKNYSVILAIEKKETIKVPTNNGKNKRVFIEPIPNFRQVAKKHLEEIFISHKAKNKVVTKNTNKPAGTNKQQITLTPRGQLHKETIYGKYQYYVNKEEKVGVKFDKETIAKVSNPLYREALLKRLQANDNDPKKAFTGKNALSKNPIYLDEAKTKTLPEKVNLTYLEEDFSVRKKIVPKNPTSKEFVPNLKSIEKVVDEGVRNILIERLRVYNNDPEKAFVDLEKNPIWLNKEKGIAIKRVTISGVNNAQPLHIGKDHLGKTTLNKEGKEIPVDYVSTGNNHHVAIYRDKEGNLQEQIVSFFEAVVRTQQGLPIIDKTYKQEEGWQFLFTMKQNEMFVFPNEATGFNPAEIDLLDPKNKKQISPNLFRVQKIATKDYFFRHHLETNVETDNVLKNTTWKREGLSGLKDIVKVRINHLGDIVSIGEY

SEQ ID NO: 915 - protein, 1426 aa, Capnocytophaga sp.
MKNILGLDLGTTSIGFTHIVEDENKEKSEIKELGVRIVSLTTDEQSDFEKGKSISTNANRTLKHGARLNLDRYQQRRKFLIDLLQKANLITSSSILAENGKNTTHSTWQLRAKAVTERIEKEEFARVLLAINKKRGYKSSRKAKTEDEGQAIDGMAIAKRLYDENLTPGQLSLQLLQQNKKLLPDFYRSDLQKEFDLVWNFQKQFYPDILTDSFYKELQGKGKDATSKAFSKRYHFDTAENKGSRESVRLQAYQWRAEAISKQLSKEEVAYVLTEINNNLNNASGYLGAISDRSKELYFNRQTVGQYLYAQLQENKHNSLKNKVFYRQDYLDEFERIWETQASFHKELTEELKKQIRDVVIFYQRKLKSQKGLISFCEFESKEIEIEKDGKTITKSIGARVVPKSSPLFQEFKIWQILNNVTCKRKGIRKKKSSAKSTELDLFNEPSQTIFSLDMECKQLLFEELNLKGDLKSDKVLKLLGYSPQEWEINYNQLEGNRTQKALYEAYLKIVEMEAHDVKDILQIKSTKDDWALEESPLSASEIRERVKAIFQTLGICTKILYFDPLLPVKEFEEQDSYQLWHLLYSYESDDSTSGNETLYRILEKKYAFKREHATILANVTLQDDYGSLSTKAIRKIYPYIKENQYSTACEKAGYKHSKLSLTTEELEARELKNIIPLLKKNALRNPVVEKILNQMINVVNALIEKNSERDAEGKITKYFHFDEIRIELARELKKNAQERYEMTQNINKAKLEHQKISGILQKEFGIKNPTKSDITRYRLYQELAHNGYNDLYTNTYIPKELLFSKNIDIEHIVSKARVFDDSFSNKTLAFREFNIKKGESTAFDYITSLNNEEELNQYLNRVENAYKTKNISPAKYKNLLKKASEIGDGFINRDLRDTQYIAKKAKEILFQVTKNVLSTSGSITDRLREDWGLVDVMKELNMPKYQSLGLTEVEERKEGNKVTVIKNWTKRNDHRHHAMDALTVAFTKPSYIQYLNHLNARKDKNNKNYSVILAIEEKETIKVPTNNGKNKRVFIEPIPNFRQVAKKHLEEIFISHKAKNKVVTKNTNKPAGTDKQQITLTPRGQLHKETVYGKYQYYVNKEEKIGVKFDKETIAKVSNPVYREALLKRLQANDNDPKKAFAGKNALSKNPIYLDEAKTKTLTEKVNLTYLEEDFSIRKDISPDNFKDLKSIEKVIDQGVKRILIKRLQDYDNDPKKAFVDLEKNPIWLNKEKGIAIKRVTISGVNNAQPLHIGKDHLGKTTLNKEGKEIPVDYVSTGNNHHVAIYRDKEGNLQEQIVSFFEAVVGAQQGLPIVDKTYKQAEGWQFLFTMKQNEMFVFPNEATGFNPAEIDLLDPKNKKQISPNLFRVQKIATKDYFFRHHLETNVDTDNVLKNTTWKREGLSGLKDIVKVRINHLGDIVSIGEY

SEQ ID NO: 916 - protein, 1450 aa, Capnocytophaga sp.
MKRILGLDLGSNSIGWAFVEQDFENKQGKIIATGSRIIPMDQGILGDFEKGNTVSQTAERTTYRSMRRLRERHLLRRERLHRVLHILGFLPPHYDAQIDFTKRYGKFIDNAEPKIAYNNGNFIFMNSFNEMIEDFKKYQPQLFYKKSNGEESKIPYDWTIYYLRKKVLSQKITQQELAWLILHFNQKRGYYQLRGEEETENPNKEVAFHSLKVVDVEAEAPNKKGEIWYTIRLENGWIYRRTSKIPLDDWKGKTRDFIVTTDLNDDGTIKVDKEGKEKRSFRAPDENDWNLLKKKTEHDIDFSGKTVGAYIYDHLLQNPNQKIKGKLVRTIERKYYKDELKAILAKQIALQPELFTETLLADCIRELYRKNETQQQNLLSKDFLHLFVEDIIFYQRPLRSKKSTIANCTLEKRSYIDKETNERKDTFIKVCAKSNPYYQEFRVLQWLQNLRIYEIETDREVTAEFIETAEDYEALFNFLMSQKEIDNEGLLKYFLFAKNPQIKDKVAKSELKKWLTTYRWNYVYDAADNSSKKYPMNETGYDLQRYLQKVEGLPANFLTFDITYRLWHLLYSVKDKVEFEKALKKFAQEYQLDEASFVDSFKNFKPYPNEYGSFSEKAIKKLLPLMRFGNHWDFNRIDVSTQKRIDDLINGVANDEIRTIIREKAEKYQLNSESCFQGLPLWLAQYVVYNRHAEATDIEKWTSVSDLETYLEDFKQHSLRNPIVEQVVTETLRVVRDIWQQYGGGQANFFDEIHIELGRELKKTAEERKQLSNRNQENENTNLRIKKLLAELKEDASIQNVRPYSPVQQELLKIYEEGVFSSTDQVEEDIQKIRKKAEPTTPEIQRYKLWLEQKYKSPYTGEVISLTKLFTEEYEIEHIIPQSRYYDDSLSNKVICESAVNKLKTNQLGLEFIQNHHGEKVRITGNKEVTIFTEEQYKEFVKKHYANNSAKQQKLLLNEIPEKMVARQLNDTRYISKYISEILSKIVRSDEKDEGVNSKNVIPCTGKITTALKQDWGLNDVWNELILPRFERMNQLTQTQLFTSYNDRFQKNLPTVPIEYSQGFQKKRIDHRHHAMDALVIACATREHINYMNNQHALDKNKDKKEKQQSRIDLRTILCEKKNNNWQFKKPWSTFTQETKEALEHIVVSFKQNLRVINKATNYYEKWEEKNGVLVKKKVKQEGTNWAIRKPLHKETVSGKIVLDRKIGKDKILTATRKEVDITFTEKIISSITDTGIQKILLNYLNYKGSPEVAFSAEGLEELNKNIAQYNDGKKHQPIYKVRIFEEGSKFPLGETGAKATKFVEAAKGTNLFFGVYQGKEKRSYATIPLNEVIERQKQGLPSVPERNEKGEPLLFSLSPNDLVYVPMEGEIAETIDFNNLSKEQKERIYKTVSFTGNQCFFVQEAVATPIVNKMEYSPLNKMERDILGTMIKEVCIKLKVDRLGNITKA

SEQ ID NO: 917 - protein, 1437 aa, Capnocytophaga sp.
MKYIKYILGLDIGSNSIGWALIQLDLLQKTKRIIATGSRIIPMDQKVLSDFGKGITISPTAQRTSYRNARHCRERHLLRRERLHRVLHILGFLPTHYDKQIDFSKRYGKFVDNTEPKIAYNERKFLFMDSFQEMLADFKIHQPDLFYTKKNGEESKIPYDWTIYYLRKKALSRKISKEELAWIILNFNQKRGYYQLREEEEENKENDFEIISSKIISVIKKDKDKKYNKYWYDIILENGLVYQAAFYNDFVYNWINQDREFIIERISLKNGTEKVKLSYLPTFDEIDKMDKKEQDKYYKKIKIKTENSIGNKTVGCYIYDHILQNPNEKIKGKLVRTIERKYYKEELKAILEKQVALQPELFTDQLFADCIRELYSKNEAQQRNLAARDFVHLFVEDIIFYQRSLRRQKSTLANCSLESRSYIDKDSHTRKEAPLKVCPKSNPYYQEFRVLQWLQNLKIYEIDTDQEVTHEFIKTLEDKQQFFDFLMNQKEIDCEELLKYFLNQTYPNAREKALKSELKKWKDTYRWNYVYDIGEKSSKKYPMNETRYELKRHLEKVANLPDDFLSSEVEYLLWHLIYSVKDKVAYEKGLKTFAQKHHLDKDSFVESFKKFKPYPSEYGSFSEKAIRKLLPLMRFGSYWDFNHIDKNTQKRIEDLITGVENEEIRTILREKAEKYQLEKETDFQDLPLWLAQYIVYNRHAEASSLEKWTSVNDLETYLNEFKQYSLRNPIVEQVVMETLRVVRDIWQQYGQGQASFFDEIHIELGRELKKTAKEREKLSKQNQKNEDINLSIKEKLKELEKYNTRAYSITHQEKYKLWLEQKHISPYTGQIISPENLFTDNYEIEHIIPQSRFFDDSLSNKVVCESIVNKAPYKDRQLGLEFIKNQGGRIVKELSTENKTIKIFTEEQYRTFIKEHYSNNPEKTKKLLLEEIPEKMVARQMNDTCYISKFISEILSKIVRSDEQDEGVHSKNVILCTGKITSALKQDWGVNDVWNDLILPRFERMNDLTQSTLFTTYNEKYQKYLPTVPMEYSNGFQKKRIDHRHHAMDAIIIACATREHINYINNQHALEKGKDKKEKQKEHDKLREKLCIKKDNKGSEENYSWIFKKPWDTFTQEVQAALEGIVVSFKQNLRVINKATNYYERWVEENGKYIKKMVKQEGTNWAIRKPLHEETISGKIYLDREEITKNDILTATRKTVDSSFDEKRIKKITDTGIQKILLNYLKYKGSPEIAFSPEGLEELNKNLSIYNDGKPHKPIYKVRIYEKGSGRFALGEKGRKYKKYVQGAPNLYFGIYQGANKRSFATIPLNEVIERQKQGRPSIPEYNEKGDPLLFSLSPNDLVYVPVEGEIIEDIDFQNLSKEQKERIYNVNDFSSTCYFTPNRIAKAIFPKEVDLQRKGDKLPGSYDTKTASLEGIQIKEVCIKLKIDRLGNISKA

SEQ ID NO: 918 - protein, 1140 aa, Catellicoccus marimammalium
MKNMTKVNVGLDVGISSAGWSVINAETNQILESGVRLFSGSDADENVNRRNQRQGRRLFRRRKLRIQEAKKYLENVFQLKDIEPKDEWNPYEIRVRALNEKVSKEELSIALLNIVKHRGISYELEDVTDEEGTNTQSFQSGLDYNRRLLKTKTVGEIQYDRLQKYGQVRGQIQTEDGLLINIFPTKNYVEEVERILETQKKYHPEIDDVFIEKIISFVTRKREYFVGPGNEKSRTDYGIYRENGETLDNLFEILIGKDKFYPEEYRAAGSSYTAQIFNLLNDLNNLRIPTTEDHHLTKAQKEEIITELKNTSRLSGGMLKLISKVTKAPKEEISGYRKDEKDKPDLHSLAYYRKQKNMLEKEGIQIADFSEELLDELATMMTLNTEPGEIRKQLNKITNQYDILTPEVIEVLVKNHTAFVATSNHKWHRFSLKLMKEFIPELLETSKEQSTILCERGFIQNRASYLDENHHFNYAELRENLYNPVVRKSTCEMLKVFTAIQEKYPNIQNVIVELPRETNEDEQKRKIKKINDNNAKRKKEILKEAQAQSGLSEEALEEKLLKTKGLYLKLMLWYEQEGKCVYSGQEIPLSDLLQNKGGYEVDHIIPISISFDDRLCNKVLVRQQLNSQKSNQTPFEYMTTHTDGHLSFHELKELVGKNKRFSKEKRELLLAEIYSNDIETRKRFINRNLVDTSYTARIVLNALQQYKKENQLSMNVSVVRGAMTNILRKKVKLDKTRETFHHHAIDASLMAVIPNIEFFKERKEWLPKSANEEVVEVEVSEEETMPEKEFKVKMRLPESFIQDVQILQRNSFAKEEVSGPQTRERNLKIKFSHQVDQKMNRKVADDTIYGTRQAQLGKDKKEETYVIGKIKDIYNYDEYVRFKKRYDKNKESFLMYHHDPQTFEKLEEILAQYPEYIEDEKGKKKKVSPFALYREENGPVTKYAKKNNGPVIKQLKYYDSKLNRKIDISHKYSTKNRQVVLQSLKPYRTDVYRNQDTGEYTLVGIDQNDGKFVNGHYGIPKSRYEEIKANNKLSEHDEFVFSLYKNSMVKVIDENGESIVVRYLSRSMPNRKNNAEIKPVEKYQFEDGEVVPVYGKCRKQMQTVFVKKGWTLLKGNTDILGNTYFVEKESENPKKMIDDK

SEQ ID NO: 919 - protein, 1419 aa, Chryseobacterium sp.
MMIKNILGLDLGTNSIGWALIKQNFENKYGEILGMGSRIIPMSQDVLGEFGKGNSVSQTAARTGYRGVRRLRERFLLRRERLHRVLNVLNFLPEHYASQIDFEKRFGKFKYETEPKLAYNNDGFFFKNSFDEMLGDFKDHQFHLLENGRKVPYDWTIYYLRKKALSQKIEKEELAWILLNFNQKRGYYQLRGEDFEEEKDRVFVRLKVDRVVDSGENIKGKILYDVYFENGWKYEKQIVKTEDWIGRTKEFIVTESILKNGDTKRTFKAVDSEKDWIAIKTKTEQEIDKSHKTVGAYIYEALLQNPKQKIKGKLVRTIERKFYREELKKILERQKEFHPELQSDDLYNDCIRELYRNNEAHQITLSKKDFVHLLLNDLIFYQRPLRSQKSSVSNCTLEFRKYKDENGVEHAQYLKTIPKSNPYYQEFRVWQWMFNLNIYRKDDDTNVTKEFLSSTEDYETLFEFLNNRKEVDQKALLRHFKLNEKTHRWNYVEDKKYPCNETKTMISTRLEKVENYPSDFLTREMEQNIWHIIYSVNDKIEYEKALKSFAHKNNLDENSFFEAFKKFPPFKSEYGSFSEKAIKKLLPLLRLGKYWNWESIDRKSQGRIEKIITGEFDGNIKDKVREKAIHLTAENDFQGLQLWLAQYIVYGRHSEASMIGKWNSADDLEEFLKGFKQHSLRNPIVEQVITETLRVVKDIWLKYGNGAKDFFSEIHIELGREMKQTKDERVDATKRITENENTNLRIKALLAEMMNDNSVENIRPYSPMQQEILKIYEDGILKSDIEIDDDILKISKTAQPSSSDLKRYKLWLEQRYKSPYTGQIIPLNKLFTSEYEIEHIIPQSRYFDDSFSNKIICESAVNKLKDNYIGLGFIKQFGGMIVECGFGKSVEIFKAEEYEDFVKKHYANNRSKRNKLLLEEIPEKMIDRQLNDTRHISKYISGVLSNIVRQEDGTDEGVNSKNIVPGNGKITTQLKQDWGLNDVWNELILPRFERMNQLTNSTDFTSWNKNHQKFLPTVPIEFSKGFSKKRIDHRHHAMDALVIACATKDHINLLNNQSAKSDTKRYDLKRKLMKFERVVYSHSKTGEKIEKEVPKQFLKPWDNFTVDAKNKMETIIVSFKQNLRVINKATNHYEKWIEKDGIKRKELIKQEGTNWAIRKPMHKETVSGKVDLPGIKIPKGKILTATRKSLDTSFDLKTINSITDTGIQKILKNYLEFKGSSELAFSPEGIEDMNKNIEKFNDGKPHQSINKVRIFELGSKFSVGQTGNKKDKYVEAAKGTNLFFAVYEDKNGKRSYETIPLNEVIERQKQGLDSVSFKNKEDFLLCPNDLVYVPSEDELENIYNIDFKNLTTEKTGNIYKVVSFSGNQIFFIRQDIAISIVNKAEFSTLNKMERAIDGSMIKENCIKLKIDRLGNIAKI

SEQ ID NO: 920 - protein, 1065 aa, Clostridium perfringens
MNKDINYALGLDIGITSVGWAVINLDLNRIEDLGVRIFNAAENPKDGSSLALPRRLARGRRRLLRRKAYRVERVRKLIVKNNILTKEELEGLFKNKEVIDVWEARVKGLDYKLSREEWAKILINFCKRRGFKSNRKNETKDKEAGQILSSISYNIEKMKETNSRTIGEYIYNEVKNSDDSYAPLRNKFGEYKMCVSRDVLREEIHTLFEKQRELGNNFASDEIEDKYFEIFNSQRPFSNFEDLEKLVGFCTFERKKHKRAPKHCISSEEFTLYEGINKLSIIKDGEKRKLSEEERTLVVNEAFNKKEIKYTTLRKLLGLSEDELFSTLTYSIDKDISKTENTKFVSLKGYHEIKRAIEKGVSKKAWQDIENNRNLLNDIAYVLTLGKTDDEIEKQLRLRNVPEELFESLLDMSFSKFNNLSIYALEKILPFMKEGYQYNEACEKAGYNFKAIYEGVRTKKLPVIEIDEIVNPVVNRALAQTRKVINSVIDKYGSPVRINIELARDLAKNFKDRKLIEKEQKENRANLDKIRENLRELMDKEPTAVEVLKYRLWEQQRGECAYTQSQIALERLFSPGYCEIDHIIPFSRSFDDSLSNKILVLGSENQRKGNKIPYEYFGEDSERWNSFEIWVKGSYLNYKKKANLLKKKFTEEEQRDWKARNLQDTKYICRYISNFVNNRLEFKESENKQKVITVNGRATAYLRSRWGLNKVREDGDKHHALDAAVVGVTTQGMVQKISKYSKAHELYTVRKNDEFVDVETGECVDVDEYKEIRKDILPRPWRGFSEELKLRLSDNPLEELKKLPIETYNEEFIKENVKPIFVSRVPFRKISGKLFKETIYSERAFKDGYFVSKKSLVDLKRGDLDNFYNYECDKKLYDAISERMKEFNYNGKKAFESPFRKPTKSGKEGPVVRSVKIKSAAPFKDGIPMNEGLVAKEGMVRIDIYEKEGKYFVVPVYRYQLAKGIVPKRAAIAGKSELKWPIMDQTYNFKFSIFKNDLIEIKYAKKDGYFGYYDGFDRHTASLVIENHDNSDRYRGIGVKTGVVEFNKYEVDVLGNYHKVNLGGN

SEQ ID NO: 921 - protein, 1099 aa, Corynebacterium accolens
MSLSYRVGIDVGTYSLGCTAIEVDDNDQPVNILSSVSLIHDSGLDPDQQKRAVTRLASSGVARRTRRLYRRRRRRMINLEKFLTSQGWETRPFEHYSDPYLPWNARVALVNGYISDDAQRGMYLSIAFRHIANHRGWRNPYWKVSSLYSPDKPSDAFEQIRKELEESTGHKIPETVTVGQLISFAQFGKDRLRGGGKKKDEKKPQEQVNQAVISARLHQIDHAREINEICRVQKIDDALRKQILDLVFAAESPKGAQIGRVGKDPLQPKLPRALKASDAFQQYRIVALAGNLRIYRDGVSTPLDRDEKLIVFNYLINLSHKEEPSWLKVAEVLNIDRGQLHGTATMTDDGERAGAAPPVHDTNRTILGCKIKPLVHWWEGANDDERAAMLKALSNSEVEDFDSPAGAQTQAFFANLDESEQEKLDSLHLPIGRAAYSEDTLMRLTSRMLDENLDLYEARLAEFDIPKDWAPPAPRIGEPVGNPAVDRVLKGVARWLEAAADEWGAPKSVVIEHVRDGFISKSKANEIDRANNARHKRNRELFKQMQENLGIDGKLRSSDLWRYQSVQRQNCQCAYCGSPITYTTCEMDHIVPRAGEGSTNTRDNLVATCHRCNLAKKNIPFAVWAAQTNIPGVSVKEALDRTRHWSEDSGMTSKDFKKFRKNVCDRLKRTVVDEPLDARSMESVAWMANELRGRVAQRFQEENTVVNVYRGELTAEARRAAGISDKLRFIDGTGKSRLDRRHHAVDAAVVAFTQNYVAETLAIRSNKKREAQLLQAAEQWKEFTGSDAEHRAAWNAWLPKMQKLAVLLQKALDEDRIAVTSNLRLRLGNGRAHEDSIGELKTIRVGDAISVTDIDRASSEALWCALTREPDFDENNGLPENPDRRIRIHGTWYDAEDDIEVFPVGAGAIKVRGGYAELSRFHHARIYKIPGKKAPVYCMLRVYNADLIRHRHEDLFSVEIKPQTMSVRQAEPKLRKALAENTAEYLGWLVTDDELVIDTSNFNTGQIAEMQSELGQVRRWRLDGFYSPSTLRLRPLQMSAEGLREDTSIGAKKIIDRPGWLPAINKLFGEGHVTVVRRDALGRARLTSNAHLPISWKAE

SEQ ID NO: 922 - protein, 1084 aa, Corynebacterium diphtheriae
MKYHVGIDVGTFSVGLAAIEVDDAGMPIKTLSLVSHIHDSGLDPDEIKSAVTRLASSGIARRTRRLYRRKRRRLQQLDKFIQRQGWPVIELEDYSDPLYPWKVRAELAASYIADEKERGEKLSVALRHIARHRGWRNPYAKVSSLYLPDGPSDAFKAIREEIKRASGQPVPETATVGQMVTLCELGTLKLRGEGGVLSARLQQSDHAREIQEICRMQEIGQELYRKIIDVVFAAESPKGSASSRVGKDPLQPGKNRALKASDAFQRYRIAALIGNLRVWVDGEKRILSVEEKNLVFDHLVNLTPKKEPEWVTIAEILGIDRGQLIGTATMTDDGERAGARPPTHDTNRSIVNSRIAPLVDWWKTASALEQHAMVKALSNAEVDDFDSPERAKVQAFFADLDDDVHAKLDSLHLPVGRAAYSEDTLVRLTRRMLSDGVDLYTARLQEFGIEPSWTPPTPRIGEPVGNPAVDRVLKTVSRWLESATKTWGAPERVIIEHVREGFVTEKRAREMDGDMRRRAARNAKLFQEMQEKLNVQGKPSRADLWRYQSVQRQNCQCAYCGSPITFSNSEMDHIVPRAGQGSTNTRENLVAVCHRCNQSKGNTPFAIWAKNTSIEGVSVKEAVERTRHWVTDTGMRSTDFKKFTKAVVERFQRATMDEEIDARSMESVAWMANELRSRVAQHFASHGTTVRVYRGSLTAEARRASGISGKLEFLDGVGKSRLDRRHHAIDAAVIAFTSDYVAETLAVRSNLKQSQAHRQEAPQWREFTGKDAEHRATWRVWCQKMEKLSALLTEDLRDDRVVVMSNVRLRLGNGSAHEETIGKLSKVKLGSQLSVSDIDKASSEALWCALTREPDFDPKDGLPANPERHIRVNGTHVYAGDNIGLFPVSAGSIALRGGYAELGSSFHHARVYKITSGKKPAFAMLRVYTIDLLPYRNQDLFSVELKPQTMSMRQAEKKLRDALATGNAEYLGWLVVDDELVVDTSKIATDQVKAVEAELGTIRRWRVDGFFGDTRLRLRPLQMSKEGIKKESAPELSKIIDRPGWLPAVNKLFSEGNVTVVRRDSLGRVRLESTAHLPVTWKVQ

SEQ ID NO: 923 - protein, 1084 aa, Corynebacterium diphtheriae
MKYHVGIDVGTFSVGLAAIEVDDAGMPIKTLSLVSHIHDSGLDPDEIKSAVTRLASSGIARRTRRLYRRKRRRLQQLDKFIQRQGWPVIELEDYSDPLYPWKVRAELAASYIADEKERGEKLSVALRHIARHRGWRNPYAKVSSLYLPDGPSDAFKAIREEIKRASGQPVPETATVGQMVTLCELGTLKLRGEGGVLSARLQQSDHAREIQEICRMQEIGQELYRKIIDVVFAAESPKGSASSRVGKDPLQPGKNRALKASDAFQRYRIAALIGNLRVRVDGEKRILSVEEKNLVFDHLVNLAPKKEPEWVTIAEILGIDRGQLIGTATMTDDGERAGARPPTHDTNRSIVNSRIAPLVDWWKTASALEQHAMVKALSNAEVDDFDSPEGAKVQAFFADLDDDVHAKLDSLHLPVGRAAYSEDTLVRLTRRMLADGVDLYTARLQEFGIEPSWTPPAPRIGEPVGNPAVDRVLKTVSRWLESATKTWGAPERVIIEHVREGFVTEKRAREMDGDMQRRAARNAKLFQEMQEKLNVQGKPSRADLWRYQSVQRQNCQCAYCGSPITFSNSEMDHIVPRAGQGSTNTRENLVAVCHRCNQSKGNTPFAIWAKNTSIEGVSVKEAVERTRHWVTDTGMRSPDFKKFTKAVVERFQRATMDEEIDARSMESVAWMANELRSRVAQHFASHGTTVRVYRGSLTAEARRASGISGKLKFFDGVGKSRLDRRHHAIDAAVIAFTSDYVAETLAVRSNLKQSQAHRQEAPQWREFTGKDAEHRAAWRVWCQKMEKLSALLTEDLRDDRVVVMSNVRLRLGNGSAHKETIGKLSKVKLGSQLSVSDIDKASSEALWCALTREPDFDPKEGLPANPERHIRVNGTHVYAGDNIGLFPVSAGSIALRGGYAELGSSFHHARVYKITSGKKPAFAMLRVYTIDLLPYRNQDLFSVELKPQTMSMRQAEKKLRDALATGNAEYLGWLVVDDELVVDTSKIATDQVKAVEAELGTIRRWRVDGFFSPSKLRLRPLQMSKEGIKKESAPELSKIIDRPGWLPAVNKLFSDGNVTVVRRDSLGRVRLESTAHLPVTWKVQ

SEQ ID NO: 924 - protein, 1084 aa, Corynebacterium diphtheriae
MKYHVGIDVGTFSVGLAAIEVDDAGMPIKTLSLVSHIHDSGLDPDKIKSAVTRLASSGIARRTRRLYRRKRRRLQQLDKFIQRQGWPVIELEDYSDPLYPWKVRAELAASYIADEKERGEKLSVALRHIARHRGWRNPYAKVSSLYLPDEPSDAFKAIREEIKRASGQPVPETATVGQMVTLCELGTLKLRGEGGVLSARLQQSDHAREIQEICRMQEIGQELYRKIIDVVFAAESPKGSASSRVGKDPLQPGKNRALKASDAFQRYRIAALIGNLRVRVDGEKRILSVEEKNLVFDHLVNLAPKKEPEWVTIAEILGIDRGQLIGTATMTDDGERAGARPPTHDTNRSIVNSRIAPLVDWWKTASALEQHAMVKALSNAEVDDFDSPEGAKVQAFFADLDDDVHAKLDSLHLPVGRAAYSEDTLVRLTRRMLADGVDLYTARLQEFGIEPSWTPPAPRIGEPVGNPAVDRVLKTVSRWLKSATKTWGAPERVIIEHVREGFVTEKRAREMDGDMRRRAARNAKLFQEMQEKLNVQGKPSRADLWRYQSVQRQNCQCAYCGSPITFSNSEMDHIVPRAGQGSTNTRENLVAVCHRCNQSKGNTPFAIWAKNTSIEGVSVKEAVERTRHWVTDTGMRSTDFKKFTKAVVERFQRATMDEEIDARSMESVAWMANELRSRVAQHFASHGTTVRVYRGSLTAEARRASGISGKLEFLDGVGKSRLDRRHHAIDAAVIAFTSDYVAETLAVRSNLKQSQAHRQEAPQWREFTGKDAEHRAAWRVWCQKMEKLSALLTEDLRDDRVVVMSNVRLRLGNGSAHEETIGKLSKVKLGSQLSVSDIDKASSEALWCALTREPDFDPKDGLPANPERHIRVNGTHVYAGDNIGLFPVSAGSIALRGGYAELGSSFHHARVYKITSGKKPAFAMLRVYTIDLLPYRNQDLFSVELKPQTMSMRQAEKKLRDALATGNAEYLGWLVVDDELVVDTSKIATDQVKAVEAELGTIRRWRVDGFFGDTRLRLRPLQMSKEGIKKESAPELSKIIDRPGWLPAVNKLFSEGNVTVVRRDSLGRVRLESTAHLPVTWKVQ

SEQ ID NO: 925 - protein, 1084 aa, Corynebacterium diphtheriae
MKYHVGIDVGTFSVGLAAIEVDDAGMPIKTLSLVSHIHDSGLDPDKIKSAVTRLASSGIARRTRRLYRRKRRRLQQLDKFIQRQGWPVIELEDYSDPLYPWKVRAELAASYIADEKERGEKLSVALRHIARHRGWRNPYAKVSSLYLPDEPSDAFKAIREEIKRASGQPVPETATVGQMVTLCELGTLKLRGEGGVLSARLQQSDHAREIQEICRMQEIGQELYRKIIDVVFAAESPKGSASSRVGKDPLQPGKNRALKASDAFQRYRIAALIGNLRVRVDGEKRILSVEEKNLVFDHLVNLAPKKEPEWVTIAEILGIDRGQLIGTATMTDDGERAGARPPTHDTNRSIVNSRIAPLVDWWKTASALEQHAMVKALSNAEVDDFDSPEGAKVQAFFADLDDDVHAKLDSLHLPVGRAAYSEDTLVRLTRRMLADGVDLYTARLQEFGIEPSWTPPAPRIGEPVGNPAVDRVLKTVSRWLESATKTWGAPERVIIEHVREGFVTEKRAREMDGDMRRRAARNAKLFQEMQEKLNVQGKPSRADLWRYQSVQRQNCQCAYCGSPITFSNSEMDHIVPRAGQGSTNTRENLVAVCHRCNQSKGNTPFAIWAKNTSIEGVSVKEAVERTRHWVTDTGMRSTDFKKFTKAVVERFQRATMDEEIDARSMESVAWMANELRSRVAQHFASHGTTVRVYRGSLTAEARRASGISGKLEFLDGVGKSRLDRRHHAIDAAVIAFTSDYVAETLAVRSNLKQSQAHRQEAPQWREFTGKDAEHRAAWRVWCQKMEKLSALLTEDLRDDRVVVMSNVRLRLGNGSAHEETIGKLSKVKLGSQLSVSDIDKASSEALWCALTREPDFDPKDGLPANPERHIRVNGTHVYAGDNIGLFPVSAGSIALRGGYAELGSSFHHARVYKITSGKKPAFAMLRVYTIDLLPYRNQDLFSVELKPQTMSMRQAEKKLRDALATGNAEYLGWLVVDDELVVDTSKIATDQVKAVEAELGTIRRWRVDGFFGDTRLRLRPLQMSKEGIKKESAPELSKIIDRPGWLPAVNKLFSEGNVTVVRRDSLGRVRLESTAHLPVTWKVQ

SEQ ID NO: 926 - protein, 1084 aa, Corynebacterium diphtheriae
MKYHVGIDVGTFSVGLAAIEVDDAGMPIKTLSLVSHIHDSGLDPDKMKSAVTRLASSGIARRTRRLYRRKRRRLQQLDKFIQRQGWPVIELEDYSDPLYPWKVRAELAASYIADEKERGEKLSVALRHIARHRGWRNPYAKVSSLYLPDEPSDAFKSIREEIKRASGQPVPETATVGQMVTLCELGTLKLRGEGGVLSARLQQSDHAREIQEICRMQEIGQELYRKIIDVVFAAESPKGSASSRVGKDPLQPGKNRALKASDSFQRYRIAALISNLRVRVDGEKRILSVEEKNLVFDHLVNLAPKKEPEWVTIAEILGIDRGQLIGTATMTDDGERAGARPPTHDTNRSIVNSRIAPLVDWWKTASALEQHAMVKALSNAEVDDFDSPEGAKVQAFFADLDDDVHAKLDSLHLPVGRAAYSEDTLVRLTRRMLADGVDLYTARLQEFGIEPSWTPPAPRIGEPVGNPAVDRVLKTVSRWLESATKTWGAPERVIIEHVRDGFVTEKRAREMDGDMRRRAARNAKLFQEMQEKLNVQGKPSRADLWRYQSVQRQNCQCAYCGSPITFSNSEMDHIVPRAGQGSTNTRENLVAVCHRCNQSKGNTPFAIWAKNTSIEGVSVKEAVERTRHWVTDTGMRSTDFKKFTKAVVERFQRATMDEEIDARSMESVAWMANELRSRVAQHFASHGTTVRVYRGSLTAEARRASGISGKLEFLDGVGKSRLDRRHHAIDAAVIAFTSDYVAETLAVRSNLKQSQAHRQEAPQWREFTGKDAEHRAAWRVWCQKMEKLSALLTEDLRDDRVVVMSNVRLRLGNGSAHEETIGKLSKVKLGSQLSVSDIDKASSEALWCALTREPDFDPKDGLPANPERHIRVNGTHVYAGDNIGLFPVSAGSIALRGGYAELGSSFHHARVYKITSGKKPAFAMLRVYTIDLLPYRNQDLFSVELKPQTMSMRQAEKKLRDALATGNAEYLGWLVVDDELVVDTSKIATDQVKAVEAELGTIRRWRVDGFFGDTRLRLRPLQMSKEGIKKELAPELSKIIDRPGWLPAVNKLFSEGNVTVVRRDSLGRVRLESTAHLPVTWKVQ

SEQ ID NO: 927 - protein, 1084 aa, Corynebacterium diphtheriae
MKYHVGIDVGTFSVGLAAIEVDDAGMPIKTLSLVSHIHDSGLDPDKMKSAVTRLASSGIARRTRRLYRRKRRRLQQLDKFIQRQGWPVIELEDYSDPLYPWKVRAELAASYIADEKERGEKLSVALRHIARHRGWRNPYAKVSSLYLPDEPSDAFKSIREEIKRASGQPVPETATVGQMVTLCELGTLKLRGEGGVLSARLQQSDHAREIQEICRMQEIGQELYRKIIDVVFAAESPKGSASSRVGKDPLQPGKNRALKASDAFQRYRIAALIGNLRVRVDGEKRILSVEEKNLVFDHLVNLAPKKEPEWVTIAEILGIDRGQLIGTATMTDDGERAGARPPTHDTNRSIVNSRIAPLVDWWKTASALEQHAMVKALSNAEVDDFDSPEGAKVQAFFADLDDDVHAKLDSLHLPVGRAAYSEDTLVRLTRRMLADGVDLYTARLQEFGIEPSWTPPAPRIGEPVGNPAVDRVLKTVSRWLESATKTWGAPERVIIEHVREGFVTEKRAREMDGDMRRRAARNAKLFQEMQEKLNVQGKPSRADLWRYQSVQRQNCQCAYCGSPITFSNSEMDHIVPRAGQGSTNTRENLVAVCHRCNQSKGNTPFAIWAKNTSIEGVSVKEAVERTRHWVTDTGMRSTDFKKFTKAVVERFQRATMDEEIDARSMESVAWMANELRSRVAQHFASHGTTVRVYRGSLTAEARRASGISGKLEFLDGVGKSRLDRRHHAIDAAVIAFTSDYVAETLAVRSNLKQSQAHRQEAPQWREFTGKDAEHRAAWRVWCQKMEKLSALLTEDLRDDRVVVMSNVRLRLGNGSAHEETIGKLSKVKLGSQLSVSDIDKASSEALWCALTREPDFDPKDGLPANPERHIRVNGTHVYAGDNIGLFPVSAGSIALRGGYAELGSSFHHARVYKITSGKKPAFAMLRVYTIDLLPYRNQDLFSVELKPQTMSMRQAEKKLRDALATGNAEYLGWLVVDDELVVDTSKIATDQVKAVEAELGTIRRWRVDGFFGDTRLRLRPLQMSKEGIKKESAPELSKIIDRPGWLPAVNKLFSEGNVTVVRRDSLGRVRLESTAHLPVTWKVQ

SEQ ID NO: 928 - protein, 1084 aa, Corynebacterium diphtheriae
MKYHVGIDVGTFSVGLAAIEVDDAGMPIKTLSLVSHIHDSRLDPDKIKSAVTRLASSGIARRTRRLYRRKRRRLQQLDKFIQRQGWPVIELEDYSDPLYPWKVRAELAASYIADEKERGEKLSVALRHIARHRGWRNPYAKVSSLYLPDEPSDAFKAIREEIKRASGQPVPETATVGQMVTLCELGTLKLRGEGGVLSARLQQSDHAREIQEICRMQEIGQELYRKIIDVVFAAESPKGSASSRVGKDPLQPGKNRALKASDAFQRYRIAALIGNLRVRVDGEKRILSVEEKNLVFDHLVNLAPKKEPEWVTIAEILGIDRGQLIGTATMTDDGERAGARPPTHDTNRSIVNSRIAPLVDWWKTASALEQHAMVKALSNAEVDDFDSPEGAKVQAFFADLDDDVHAKLDSLHLPVGRAAYSEDTLVRLTRRMLADGVDLYTARLQEFGIEPSWTPPAPRIGEPVGNPAVDRVLKTVSRWLESATKTWGAPERVIIEHVREGFVTEKRAREMDGDMRRRAARNAKLFQEMQEKLNIQGKPSRADLWRYQSVQRQNCQCAYCGSPITFSNSEMDHIVPRAGQGSTNTRENLVAVCHRCNQSKGNTPFAIWAKNTSIEGVSVKEAVERTRHWVTDTGMRSTDFKKFTKAVVERFQRVTMDEEIDARSMESVAWMANELRSRVAQHFASRGTTVRVYRGSLTAEARRASGISGKLEFLDGVGKSRLDRRHHAIDAAVIAFTSDYVAETLAVRSNLKQSQAHRQEAPQWREFTGKDAEHRAAWRVWCQKMEKLSALLTEDLRDDRVVVMSNVRLRLGNGSAHEETIGKLSKVKLGSQLSVSDIDKASSEALWCALTREPDFDPKDGLPANPERHIRVNGTHVYAGDNIGLFPVSAGSIALRGGYAELGSSFHHARVYKITSGKKPAFAMLRVYTIDLLPYRNQDLFSVELKPQTMSMRQAEKKLRDALATGNAEYLGWLVVDDELVVDTSKIATDQVKAVEAELGTIRRWRVDGFFGDTRLRLRPLQMSKEGIKKESAPELSKIIDRPGWLPAVNKLFSEGNVTVVRRDSLGRVRLESTAHLPVTWKVQ

SEQ ID NO: 929 - protein, 1069 aa, Corynebacterium matruchotii
MAAIAIDDDGKPTEILSAISLIHDSGVDPDSAKSAATRLATSGIARRTRRLYRRKRKRLAKLDKFISSQGWPLKEFEKYEDPFYPWRVRAELATTAITDQQELGEKLSIALRHIARHRGWRNPYSKVTALYTVTEPSDAFLAMQEECAKQLGRTIPETITVGQLVTGMNLGKTRLRGENSLLAARPRQSDNANEIHTIAKVQGLSNELVRQIIDHVFAAESPKGSAAEQVGKDPLQPTKKRALKASDAFQQYRIAALIGNLRIRGGKGNRRLTTEETRLVFDYLRSLPAKQEPTWQLVAEQLKIDRGNLVGTAIMTDDGERAGAKPPVHDTNRIMENTKIKPLATWWKSADADARAAMVKALSNAEVDDFDSQAGAQVQEFFFGISDEDQEKLDGLHLPIGRAAYSEDTLDRLTKRMIGEGMDLYEARQAEFKISNDWAPPAPEIGERVGNPAVDRVLKATARWLNAAERQWGAPKSVNIEHVRAAFMSESSARELDRDNQQRAKRNVKVVAEMQEKLGIEGRPSRADVWRFQSIQRQNGKCAYCGAEISFKNSEMDHIIPQVGEGSTNTRDNLVAVCRECNSSKSNIAFAVWAENTSRPGVSVQKAIERTHHWVTDSGLRKPEFDKFRKQVCDRLRRKATDEPIDARSLESVAWMANELRSRIAQKFKDGDTKVRVYKGALTAEARRASGISGKLEFVDGKGKSRLDRRHHAVDAAVVAFTSNYVAETLALRSNMKFDQELRRKAPQWREFTGSDHVHQVEWTKWKYRMQALAELLNNALVQDRIVVMHNLRLRLGNGAAHEDTIGKLTRLKVGDAISTTDIDRASSEALWCALTRDPDYDPKTGLPENPNRTIRIHGTHLTASDEITVFPVAAASIPIRDGFAKLGSNYHHVRLFRVPSGKKYKYCLMQVYTVDLLKFRKEDLFTVELKPQTISVRTCEALLRKALANGTAEYLGWLVSDDELLIDTSSFDTPGIVKLREEYGPVNRWRLAGLTSVTRLNLRPLYLSKEGLKPNVNPEIKKIIDNRSWIITVNKLFSSGHVKIIRRDALGRPRLHSAAHLPICWEVK

SEQ ID NO: 930 - protein, 210 aa, Diplosphaera colitermitum
MSDILDKPIVLSLNRAWQVIGHRTVKQALVALNGGNADLPPALGLDIAYPKFDDGAWNFDRPLFLNPLPWSEWIELPVRDFDFAITTPRLRIRVPTVIVATQFAKMPVRIPRLTREAIFERDGGVCQYTGEHVGKHGGNLDHVVPRDRGGRDSFENLVWAKREINSLKANRLPHEAGLRLLRRPKAPAPLPASMTIREARHPDWRHFLTP

SEQ ID NO: 931 - protein, 1332 aa, Dolosigranulum pigrum
MQKNYTIGLDIGTNSVGWAVMKDDYTLIRKRMKVLGNTDIKKIKKNFWGVRLFDEGETAKETRLKRGTRRRYQRRRNRLIYLQDIFQQPMLAIDENFFHRLDDSFFVPDDKSYDRHPIFGSLEEEVAYHNTYPTIYHLRKHLADNPEKADLRLVYTALAHIVKYRGHFLIEGELNTENTSISETFEQFLDTYSDIFKEQLVGDISKVEEILSSKQSRSRKHEQIMALFPNENKLGNFGRFMMLIVGNTSNFKPVFDLDDEYKLKLSDETYEEDLDTLLGMTDDVFLDVFMAAKNVYDAVEMSAIISTDTGNSKAVLSNQMINFYDEHKVDLAQLKQFFKTHLPDKYYECFSDPSKNGYAGYIDGKTNQEDFYKYIEKVMKTIKSDKKDYFLDKIDREVFLRKQRSFYNSVIPHQIHLQEMQAILDRQSQYYPFLAENRDKIESLVTFRIPYYVGPLTVSDQSEFAWMERQSDEPIRPWNFDEIVNKERSAEKFIERMTNMDTYLLEEKVLPKRSLLYQTFEVYNELTKVRYTNEQGKTEKLNRQQKAEIIETLFKQKNRVREKDIANYLEQYGYVDGTDIKGVEDKFNASLSTYNDLAKIDGAKAYLDDPEYADVWEDIIKILTIFEDKAMRKKQLQTYSDTLSPEILKKLERKHYTGWGRFSKKLINGLRDEGSNKTILDYLKSDEGSSGPTNRNFMQLIRDNTLSFKKKIEDAQTIEDTTHIYDTVAELPGSPAIKKGIRQALKIVEEIIDIIGYEPENIVVEMARESQTTKKGKDLSKERLEKLTEAIKEFDGPSDVKVKDLKNENLRNDRLYLYYLQNGRDMYTNEPLDINNLSKYDIDHIIPQSFTTDNSIDNKVLVSRTKNQGNKSDDVPSINIVHKMKPFWRQLHKAGLISDRKFKNLTKAEHGGLTEADRAHFLNRQLVETRQITKHVANLLDSQYNTAEEQRINIVLLKSSMTSRFRKEFKLYKVREINDYHHGHDAYLNAVVATTIMKVYPNLKPQFVYGQYKKTSMFKEEKATARKHFYSNITKFFKKEKVVNEETGEILWDTERHLSTIKRVLSWKQMNIVKKVEKQKGQLWKETIYPKGDSSKLIPVKEGMDPQKYGGLSQVSEAFAVVITHEKGKKKQLKSDLISIPIVDQKAYEQHPTAYLEEAGYNNPTVLHELFKYQLFELEDGSRRMIASAKEFQKGNQMVLPLELVELLYHANRYDKVKFPDSIEYVHDNLAKFDDLLEYVIDFSNKYINADKNVQKIQKIYKEHGTEDVELTVESFVNLMTFTAMGAPATFKFYGESITRSRYTSITEFRGSTLIFQSITGLYETRYKLEDN

SEQ ID NO: 932 - protein, 921 aa, Enterococcus faecalis
MIPHQIHLAELQAIIHRQAAYYPFLKENQEKIEQLVTFRIPYYVGPLSKGDASTFAWLKRQSEEPIRPWNLQETVDLDQSATAFIERMTNFDTYLPSEKVLPKHSLLYEKFMVFNELTKISYTDDRGIKANFSGKEKEKIFDYLFKTRRKVKKKDIIQFYRNEYNTEIVTLSGLEEDQFNASFSTYQDLLKCGLTRAELDHPDNAEKLEDIIKILTIFEDRQRIRTQLSTFKGQFSAEVLKKLERKHYTGWGRLSKKLINGIYDKESGKTILGYLIKDDGVSKHYNRNFMQLINDSQLSFKNAIQKAQSSEHEETLSETVNELAGSPAIKKGIYQSLKIVDELVAIMGYAPKRIVVEMARENQTTSTGKRRSIQRLKIVEKAMAEIGSNLLKEQPTTNEQLRDTRLFLYYMQNGKDMYTGDELSLHRLSHYDIDHIIPQSFMKDDSLDNLVLVGSTENRGKSDDVPSKEVVKDMKAYWEKLYAAGLISQRKFQRLTKGEQGGLTLEDKAHFIQRQLVETRQITKNVAGILDQRYNANSKEKKVQIITLKASLTSQFRSIFGLYKVREVNDYHHGQDAYLNCVVATTLLKVYPNLAPEFVYGEYPKFQTFKENKATAKAIIYTNLLRFFTEDEPRFTKDGEILWSNSYLKTIKKELNYHQMNIVKKVEVQKGGFSKESIKPKGPSNKLIPVKNGLDPQKYGGFDSPIVAYTVLFTHEKGKKPLIKQEILGITIMEKTRFEQNRILFLEEKGFLRPRVLMKLPKYTLYEFPEGRRRLLASAKEAQKGNQMVLPEHLLTLLYHAKQCLLPNQSESLTYVEQHQPEFQEILERVVDFAEVHTLAKSKVQQIVKLFEANQTADVKEIAASFIQLMQFNAMGAPSTFKFFQKDIERARYTSIKEIFDATIIYQSTTGLYETRRKVVD

SEQ ID NO: 933 - protein, 1337 aa, Enterococcus faecalis; identical to SEQ ID NO: 110

SEQ ID NO: 934 - protein, 1337 aa, Enterococcus faecalis
MKKDYVIGLDIGTNSVGWAVMTEDYQLVKKKMPIYGNTEKKKIKKNFWGVRLFEEGHTAEDRRLKRTARRRISRRRNRLRYLQAFFEEAMTALDENFFARLQESFLVPEDKKWHRHPIFAKLEDEVAYHETYPTIYHLRKKLADSSEQADLRLIYLALAHIVKYRGHFLIEGKLSTENISVKEQFQQFMIIYNQTFVNGESRLVSAPLPESVLIEEELTEKASRTKKSEKVLQQFPQEKANGLFGQFLKLMVGNKADFKKVFGLEEEAKITYASESYEEDLEGILAKVGDEYSDVFLAAKNVYDAVELSTILADSDKKSHAKLSSSMIVRFTEHQEDLKNFKRFIRENCPDEYDNLFKNEQKDGYAGYITHAGKVSQLKFYQYVKKIIQDIAGAEYFLEKIAQENFLRKQRTFDNGVIPHQIHLAELQAIIHRQAAYYPFLKENQEKIEQLVTFRIPYYVGPLSKGDANTFAWLKRQSEEPIRPWNLQETVDLDQSATAFIERMTNFDTYLPSEKVLPKHSLLYEKFMVFNELTKISYTDDRGIKANFSGKEKEKIFDYLFKTRRKVKKKDIIQFYRNEYNTEIVTLSGLEEDQFNASFSTYQDLLKCGLTRAELDHPDNAEKLEDIIKILTIFEDRQRIRTQLSTFKGQFSAEVLKKLERKHYTGWGRLSKKLINGIYDKESGKTILDYLIKDDGVSKHYNRNFMQLINDSQLSFKNAIQKAQSSEHEETLSETVNELAGSPAIKKGIYQSLKIVDELVAIMGYAPKRIVVEMARENQTTSTGKRRSIQRLKIVEKAMAEIGSNLLKEQPTTNEQLRDTRLFLYYMQNGKDMYTGDELSLHRLSHYDIDHIIPQSFMKDDSLDNLVLVGSTENRGKSDDVPSKEVVKDMKAYWEKLYAAGLISQRKFQRLTKGEQGGLTLEDKAHFIQRQLVETRQITKNVAGILDQRYNAKSKEKKVQIITLKASLTSQFRSIFGLYKVREVNDYHHGQDAYLNCVVATTLLKVYPNLAPEFVYGEYPKFQTFKENKATAKAIIYTNLLRFFTEDEPRFTKDGEILWSNSYLKTIKKELNYHQMNIVKKVEVQKGGFSKESIKPKGPSNKLIPVKNGLDPQKYGGFDSPIVAYTVLFTHEKGKKPLIKQEILGITIMEKTRFEQNPILFLEEKGFLRPRVLMKLPKYTLYQFPEGRRRLLASAKEAQKGNQMVLPEHLLTLLYHAKQCLLPNQSESLAYVEQHQPEFQEILERVVDFAEVHTLAKSKVQQIVKLFEANQTADVKEIAASFIQLMQFNAMGAPSTFKFFQKDIERARYTSIKEIFDATIIYQSTTGLYETRRKVVD

SEQ ID NO: 935 - protein, 1337 aa, Enterococcus faecalis
MKKDYVIGLDIGTNSVGWAVMTEDYQLVKKKMPIYGNTEKKKIKKNFWGVRLFEEGHTAEDRRLKRTARRRISRRRNRLRYLQAFFEEAMTALDENFFARLQESFLVPEDKKWHRHPIFAKLEDEVAYHETYPTIYHLRKKLADSSEQADLRLIYLALAHIVKYRGHFLIEGKLSTENISVKEQFQQFMIIYNQTFVNGESRLVSTPLPESVLIEEELTEKASRTKKSEKVLQQFPQEKANGLFGQFLKLMVGNKADFKKVFGLEEEAKITYASESYEEDLEGILAKVGDEYSDVFLAAKNVYDAVELSTILADSDKKSHAKLSSSMIVRFTEHQEDLKNFKRFIRENCPDEYDNLFKNEQKDGYAGYITHAGKVSQLKFYQYVKKIIQDIAGAEYFLEKIAQENFLRKQRTFDNGVIPHQIHLAELQAIIHRQAAYYPFLKENQEKIEQLVTFRIPYYVGPLSKGDASTFAWLKRQSEEPIRPWNLQETVDLDQSATAFIERMTNFDTYLPSEKVLPKHSLLYEKFMVFNELTKISYTDDRGIKANFSGKEKEKIFDYLFKTRRKVKKKDIIQFYRNEYNTEIVTLSGLEEDQFNASFSTYQDLLKCGLTRAELDHPDNAEKLEDIIKILTIFEDRQRIRTQLSTFKGQFSAEVLKKLERKHYTGWGRLSKKLINGIYDKESGKTILDYLVKDDGVSKHYNRNFMQLINDSQLSFKNAIQKAQSSEHEETLSETVNELAGSPAIKKGIYQSLKIVDELVAIMGYAPKRIVVEMARENQTTSTGKRRSIQRLKIVEKAMAEIGSNLLKEQPTTNEQLRDTRLFLYYMQNGKDMYTGDELSLHRLSHYDIDHIIPQSFMKDDSLDNLVLVGSTENRGKSDDVPSKEVVKDMKAYWEKLYAAGLISQRKFQRLTKGEQGGLTLEDKAHFIQRQLVETRQITKNVAGILDQRYNAKSKEKKVQIITLKASLTSQFRSIFGLYKVREVNDYHHGQDAYLNCVVATTLLKVYPNLAPEFVYGEYPKFQTFKENKATAKAIIYTNLLRFFTEDEPRFTKDGEILWSNSYLKTIKKELNYHQMNIVKKVEVQKGGFSKESIKPKGPSNKLIPVKNGLDPQKYGGFDSPIVAYTVLFTHEKGKKPLIKQEILGITIMEKTRFEQNPILFLEEKGFLRPRVLMKLPKYTLYEFPEGRRRLLASAKEAQKGNQMVLPEHLLTLLYHAKQCLLPNQSESLAYVEQHQPEFQEILERVVDFAEVHTLAKSKVQQIVKLFEANQTADVKEIAASFIQLMQFNAMGAPSTFKFFQKDIERARYTSIKEIFDATIIYQSTTGLYETRRKVVD

SEQ ID NO: 936 - protein, 1337 aa, Enterococcus faecalis
MKKDYVIGLDIGTNSVGWAVMTEDYQLVKKKMPIYGNTEKKKIKKNFWGVRLFEEGHTAEDRRLKRTARRRISRRRNRLRYLQAFFEEAMTDLDENFFARLQESFLVPEDKKWHRHPIFAKLEDEVAYHETYPTIYHLRKKLADSSEQADLRLIYLALAHIVKYRGHFLIEGKLSTENISVKEQFQQFMIIYNQTFVNGESRLVSAPLPESVLIEEELTEKASRTKKSEKVLQQFPQEKANGLFGQFLKLMVGNKADFKKVFGLEEEAKITYASESYEEDLEGILAKVGDEYSDVFLAAKNVYDAVELSTILADSDKKSHAKLSSSMIVRFTEHQEDLKKFKRFIRENCPDEYDNLFKNEQKDGYAGYIAHAGKVSQLKFYQYVKKIIQDIAGAEYFLEKIAQENFLRKQRTFDNGVIPHQIHLAELQAIIHRQAAYYPFLKENQEKIEQLVTFRIPYYVGPLSKGDASTFAWLKRQSEEPIRPWNLQETVDLDQSATAFIERMTNFDTYLPSEKVLPKHSLLYEKFMVFNELTKISYTDDRGIKANFSGKEKEKIFDYLFKTRRKVKKKDIIQFYRNEYNTEIVTLSGLEEDQFNASFSTYQDLLKCGLTRAELDHPDNAEKLEDIIKILTIFEDRQRIRTQLSTFKGQFSAEVLKKLERKHYTGWGRLSKKLINGIYDKESGKTILGYLIKDDGVSKHYNRNFMQLINDSQLSFKNAIQKAQSSEHEETLSETVNELAGSPAIKKGIYQSLKIVDELVAIMGYAPKRIVVEMARENQTTSTGKRRSIQRLKIVEKAMAEIGSNLLKEQPTTNEQLRDTRLFLYYMQNGKDMYTGDELSLHRLSHYDIDHIIPQSFMKDDSLDNLVLVGSTENRGKSDDVPSKEVVKDMKAYWEKLYAAGLISQRKFQRLTKGEQGGLTLEDKAHFIQRQLVETRQITKNVAGILDQRYNANSKEKKVQIITLKASLTSQFRSIFGLYKVREVNDYHHGQDAYLNCVVATTLLKVYPNLAPEFVYGEYPKFQTFKENKATAKAIIYTNLLRFFTEDEPRFTKDGEILWSNSYLKTIKKELNYHQMNIVKKVEVQKGGFSKESIKPKGPSNKLIPVKNGLDPQKYGGFDSPIVAYTVLFTHEKGKKPLIKQEILGITIMEKTRFEQNPILFLEEKGFLRPRVLMKLPKYTLYEFPEGRRRLLASAKEAQKGNQMVLPEHLLTLLYHAKQCLLPNQSESLAYVEQHQPEFQEILERVVDFAEVHTLAKSKVQQIVKLFEANQTADVKEIAASFIQLMQFNAMGAPSTFKFFQKDIERARYTSIKEIFDATIIYQSTTGLYETRRKVVD

SEQ ID NO: 937 - protein, 936 aa, Enterococcus faecalis
MKKDYVIGLDIGTNSVGWAVMTEDYQLVKKKMPIYGNTEKKKIKKNFWGVRLFEEGHTAEDRRLKRTARRRISRRRNRLRYLQAFFEEAMTDLDENFFARLQESFLVPEDKKWHRHPIFAKLEDEVAYHETYPTIYHLRKKLADSSEQADLRLIYLALAHIVKYRGHFLIEGKLSTENISVKEQFQQFMIIYNQTFVNGESRLVSAPLPESVLIEEELTEKASRTKKSEKVLQQFPQEKANGLFGQFLKLMVGNKADFKKVFGLEEEAKITYASESYEEDLEGILAKVGDEYSDVFLAAKNVYDAVELSTILADSDKKSHAKLSSSMIVRFTEHQEDLKKFKRFIRENCPDEYDNLFKNEQKDGYAGYIAHAGKVSQLKFYQYVKKIIQDIAGAEYFLEKIAQENFLRKQRTFDNGVIPHQIHLAELQAIIHRQAAYYPFLKENQEKIEQLVTFRIPYYVGPLSKGDASTFAWLKRQSEEPIRPWNLQETVDLDQSATAFIERMTNFDTYLPSEKVLPKHSLLYEKFMVFNELTKISYTDDRGIKANFSGKEKEKIFDYLFKTRRKVKKKDIIQFYRNEYNTEIVTLSGLEEDQFNASFSTYQDLLKCGLTRAELDHPDNAEKLEDIIKILTIFEDRQRIRTQLSTFKGQFSAEVLKKLERKHYTGWGRLSKKLINGIYDKESGKTILGYLIKDDGVSKHYNRNFMQLINDSQLSFKNAIQKAQSSEHEETLSETVNELAGSPAIKKGIYQSLKIVDELVAIMGYAPKRIVVEMARENQTTSTGKRRSIQRLKIVEKAMAEIGSNLLKEQPTTNEQLRDTRLFLYYMQNGKDMYTGDELSLHRLSHYDIDHIIPQSFMKDDSLDNLVLVGSTENRGKSDDVPSKEVVKDMKAYWEKLYAAGLISQRKFQRLTKGEQGGLTLEDKAHFIQRQLVETR

SEQ ID NO: 938 - protein, 1337 aa, Enterococcus faecalis
MKKDYVIGLDIGTNSVGWAVMTEDYQLVKKKMPIYGNTEKKKIKKNFWGVRLFEEGHTAEDRRLKRTARRRISRRRNRLRYLQAFFEEAMTDLDENFFARLQESFLVPEDKKWHRHPIFAKLEDEVAYHETYPTIYHLRKKLADSSEQADLRLIYLALAHIVKYRGHFLIEGKLSTENISVKEQFQQFMIIYNQTFVNGESRLVSAPLPESVLIEEELTEKASRTKKSEKVLQQFPQEKANGLFGQFLKLMVGNKADFKKVFGLEEEAKITYASESYEEDLEGILAKVGDEYSDVFLAAKNVYDAVELSTILADSDKKSHAKLSSSMIVRFTEHQEDLKKFKRFIRENCPDEYDNLFKNEQKDGYAGYIAHAGKVSQLKFYQYVKKIIQDIAGAEYFLEKIAQENFLRKQRTFDNGVIPHQIHLAELQAIIHRQAAYYPFLKENQEKIEQLVTFRIPYYVGPLSKGDASTFAWLKRQSEEPIRPWNLQETVDLDQSATAFIERMTNFDTYLPSEKVLPKHSLLYEKFMVFNELTKISYTDDRGIKANFSGKEKEKIFDYLFKTRRKVKKKDIIQFYRNEYNTEIVTLSGLEEDQFNASFSTYQDLLKCGLTRAELDHPDNAEKLEDIIKILTIFEDRQRIRTQLSTFKGQFSAEVLKKLERKHYTGWGRLSKKLINGIYDKESGKTILDYLVKDDGVSKHYNRNFMQLINDSQLSFKNAIQKAQSSEHEETLSETVNELAGSPAIKKGIYQSLKIVDELVAIMGYAPKRIVVEMARENQTTSTGKRRSIQRLKIVEKAMAEIGSNLLKEQPTTNEQLRDTRLFLYYMQNGKDMYTGDELSLHRLSHYDIDHIIPQSFMKDDSLDNLVLVGSTENRGKSDDVPSKEVVKDMKAYWEKLYAAGLISQRKFQRLTKGEQGGLTLEDKAHFIQRQLVETRQITKNVAGILNQRYNANSKEKKVQIITLKASLTSQFRSIFGLYKVREVNDYHHGQDAYLNCVVATTLLKVYPNLAPEFVYGEYPKFQTFKENKATAKAIIYTNLLRFFTEDEPRFTKDGEILWSNSYLKTIKKELNYHQMNIVKKVEVQKGGFSKESIKPKGPSNKLIPVKNGLDPQKYGGFDSPVVAYTVLFTHEKGKKPLIKQEILGITIMEKTRFEQNPILFLEEKGFLRPRVLMKLPKYTLYEFPEGRRRLLASAKEAQKGNQMVLPEHLLTLLYHAKQCLLPNQSESLAYVEQHQPEFQEILERVVDFAEVHTLAKSKVQQIVKLFEANQTADVKEIAASFIQLMQFNAMGAPSTFKFFQKDIERARYTSIKEIFDATIIYQSTTGLYETRRKVVD

SEQ ID NO: 939 - protein, 1337 aa, Enterococcus faecalis
MKKDYVIGLDIGTNSVGWAVMTEDYQLVKKKMPIYGNTEKKKIKKNFWGVRLFEEGHTAEDRRLKRTARRRISRRRNRLRYLQAFFEEAMTDLDENFFARLQESFLVPEDKKWHRHPIFAKLEDEVAYHETYPTIYHLRKKLADSSEQADLRLIYLALAHIVKYRGHFLIEGKLSTENISVKEQFQQFMIIYNQTFVNGESRLVSAPLPESVLIEEELTEKASRTKKSEKVLQQFPQEKANGLFGQFLKLMVGNKADFKKVFGLEEEAKITYASESYEEDLEGILAKVGDEYSDVFLAAKNVYDAVELSTILADSDKKSHAKLSSSMIVRFTEHQEDLKKFKRFIRENCPDEYDNLFKNEQKDGYAGYIAHAGKVSQLKFYQYVKKIIQDIAGAEYFLEKIAQENFLRKQRTFDNGVIPHQIHLAELQAIIHRQAAYYPFLKENQEKIEQLVTFRIPYYVGPLSKGDASTFAWLKRQSEEPIRPWNLQETVDLDQSATAFIERMTNFDTYLPSEKVLPKHSLLYEKFMVFNELTKISYTDDRGIKANFSGKEKEKIFDYLFKTRRKVKKKDIIQFYRNEYNTEIVTLSGLEEDQFNASFSTYQDLLKCGLTRAELDHPDNAEKLEDIIKILTIFEDRQRIRTQLSTFKGQFSAEVLKKLERKHYTGWGRLSKKLINGIYDKESGKTILGYLIKDDGVSKHYNRNFMQLINDSQLSFKNAIQKAQSSEHEETLSETVNELAGSPAIKKGIYQSLKIVDELVAIMGYAPKRIVVEMARENQTTSTGKRRSIQRLKIVEKAMAEIGSNLLKEQPTTNEQLRDTRLFLYYMQNGKDMYTGDELSLHRLSHYDIDHIIPQSFMKDDSLDNLVLVGSTENLGKSDDVPSKEVVKDMKAYWEKLYAAGLISQRKFQRLTKGEQGGLTLEDKAHFIQRQLVETRQITKNVAGILDQRYNANSKEKKVQIITLKASLTSQFRSIFGLYKVREVNDYHHGQDAYLNCVVATTLLKVYPNLAPEFVYGEYPKFQTFKENKATAKAIIYTNLLRFFTEDEPRFTKDGEILWSNSYLKTIKKELNYHQMNIVKKVEVQKGGFSKESIKPKGPSNKLIPVKNGLDPQKYGGFDSPIVAYTVLFTHEKGKKPLIKQEILGITIMEKTRFEQNPILFLEEKGFLRPRVLMKLPKYTLYEFPEGRRRLLASAKEAQKGNQMVLPEHLLTLLYHAKQCLLPNQSESLAYVEQHQPEFQEILERVVDFAEVHTLAKSKVQQIVKLFEANQTADVKEIAASFIQLMQFNAMGAPSTFKFFQKDIERARYTSIKEIFDATIIYQSTTGLYETRRKVVD

SEQ ID NO: 940 - protein, 1337 aa, Enterococcus faecalis
MKKDYVIGLDIGTNSVGWAVMTEDYQLVKKKMPIYGNTEKKKIKKNFWGVRLFEEGHTAEDRRLKRTARRRISRRRNRLRYLQAFFEEAMTDLDENFFARLQESFLVPEDKKWHRHPIFAKLEDEVAYHETYPTIYHLRKKLADSSEQADLRLIYLALAHIVKYRGHFLIEGKLSTENTSVKEQFQQFMVIYNQTFVNGESRLVSAPLPESVLIEEELTEKASRTKKSEKVLQQFPQEKANGLFGQFLKLMVGNKADFKKVFGLEEEAKITYASESYEEDLEGILAKVGDEYSDVFLAAKNVYDAVELSTILADSDKKSHAKLSSSMIVRFTEHQEDLKKFKRFIRENCPDEYDNLFKNEQKDGYAGYIAHAGKVSQLKFYQYVKKIIQDIAGAEYFLEKIAQENFLRKQRTFDNGVIPHQIHLAELQAIIHRQAAYYPFLKENQEKIEQLVTFRIPYYVGPLSKGDASTFAWLKRQSEEPIRPWNLQETVDLDQSATAFIERMTNFDTYLPSEKVLPKHSLLYEKFMVFNELTKISYTDDRGIKANFSGKEKEKIFDYLFKTRRKVKKKDIIQFYRNEYNTEIVTLSGLEEDQFNASFSTYQDLLKCGLTRAELDHPDNAEKLEDIIKILTIFEDRQRIRTQLSTFKGQFSAEVLKKLERKHYTGWGRLSKKLINGIYDKESGKTILDYLVKDDGVSKHYNRNFMQLINDSQLSFKNAIQKAQSSEHEETLSETVNELAGSPAIKKGIYQSLKIVDELVAIMGYAPKRIVVEMARENQTTSTGKRRSIQRLKIVEKAMAEIGSNLLKEQPTTNEQLRDTRLFLYYMQNGKDMYTGDELSLHRLSHYDIDHIIPQSFMKDDSLDNLVLVGSTENRGKSDDVPSKKVVKKMKAYWEKLYAAGLISQRKFQRLTKGEQGGLTLEDKAHFIQRQLVETRQITKNVAGILDQRYNAKSKEKKVQIITLKASLTSQFRSIFGLYKVREVNDYHHGQDAYLNCVVATTLLKVYPNLAPEFVYGEYPKFQAFKENKATAKTIIYTNLMRFFTEDEPRFTKDSEILWSNSYLKTIKKELNYHQMNIVKKVEVQKGGFSKESIKPKGPSNKLIPVKNGLDPQKYGGFDSPVVAYTVLFTHEKGKKPLIKQEILGITIMEKTRFEQNPILFLEEKGFLRPRVLMKLPKYTLYEFPEGRRRLLASAKEAQKGNQMVLPEHLLTLLYHAKQCLLPNQSESLAYVEQHQPEFQEILERVVDFAEVHTLAKSKVQQIVKLFEANQTADVKEIAASFIQLMQFNAMGAPSTFKFFQKDIERARYTSIKEIFDATIIYQSTTGLYETRRKVVD

SEQ ID NO: 941 - protein, 1150 aa, Enterococcus faecalis
MYSIGLDLGISSVGWSVIDERTGNVIDLGVRLFSAKNSEKNLERRTNRGGRRLIRRKTNRLKDAKKILAAVGFYEDKSLKNSCPYQLRVKGLTEPLSKGEIYKVTLHILKKRGISYLDEDDTEAAKESQDYKEQVRENAQLLTKYTPGQIQLQRLKENNRVKTGINAQGNYQLNVFKVSAYANELATILKTQQAFYPNELTDDWIALFVQPGIAEEAGLIYRKRPYYHGPGNEANNSPYGRWSDFKKTGQPATNIFDKLIGKDFQGELRASGLSLSAQQYNLLNDLTNLKIDGEIPLSPEQKEYILAELMTKEFTRFGVNDVVKLLGVKKERLSGWRLDKKGKPEIHTLKGYRNWRKIFAESGIDLAMLPTETIDCLAKILTLNTEREGIENTLAFELPELAESVKLLVLDRYKELSQSVSTQAWHRFSLKTLHLLIPELMNATSEQNTLLEQFQLKSDVRKRYSEYKKLPTKDVLTEIYNPTVNKTVSQAFKVIDALLVKYGKEQIRYITIEMPRDDNEEDEKKRIKELHAKNSQRKNDSQSYFMQKSGWSQEKFQTTIQKNRRFLAKLLYYYEQDGICAYTGLSISPELLVSDSTEIDHIIPISISLDDSINNKVLVLSKANQVKGQQTPYDAWMDGSFKKINGKFSNWDDYQKWVESRHFSHKKENNLLETRNIFDSEQVEKFLARNLNDTRYASRLVLNTLQSFFANQETKVRVVNGSFTHTLRKKWGADLDKTRETHHHHAVDATLCAVTPFVKVSRYHYAVKEETGEKVMREIDFETGEIVDEMSYREFKKSKKYERKTYQVKWPNFREQLKPVNLHPRIKFSHQVDRKANRKLSDATIYSVREKTEVKTLKSGKQKITTDEYTIGKIKDIYTVDGWEAFKKKQDKLLMKDLDEKTYERLLSIAETTPDFQEVEEKNGKVKRVKRSPFAVYCEENDIPAIRKYAKKNNGPLIRSLKYYDGKLNKHINITKDSQGRPVEKTKNGRKVTLQSLKPYRYDIYQDLETKAYYTVQLYYSDLRFVEGKYGITEKEYMKKVAEQTKGQVVRFCFSLQKNDGLEIEWKDSQRYDVRFYNFQSANSINFKGLEQEMMPAENQFKQKPYNNGAINLNIAKYGKEGKKLRKFNTDILGKKHYLYYEKEPKNIIK

SEQ ID NO: 942 - protein, 1150 aa, Enterococcus faecalis
MYSIGLDLGISSVGWSVIDERTGNVIDLGVRLFSAKNSEKNLERRTNRGGRRLIRRKTNRLKDAKKILAAVGFYEDKSLKNSCPYQLRVKGLTEPLSKGEIYKVTLHILKKRGISYLDEDDTEAAKESQDYKEQVRKNAQLLTKYTPGQIQLQRLKENNRVKTGINAQGNYQLNVFKVSAYANELATILKTQQAFYPNELTDDWIALFVQPGIAEEAGLIYRKRPYYHGPGNEANNSPYGRWSDFKKTGQPATNIFDRLIGKDFQGELRASGLSLSAQQYNLLNDLTNLKIDGEIPLSPEQKEYILAELMTKEFTRFGVNDVAKLLGVKKERLSGWRLDKKGKPEIHTLKGYRNWRKIFAESGIDLATLPTETIDCLAKVLTLNTEHEGIENTLAFELPELAESVKLLVLDRYKELSQSVSTQAWHRFSLKTLHLLIPELMNATSEQNTLLEQFQLKSDVRKRYSEYKKLPTKDVLTEIYNPTVNKTVSQAFKVIDALLVKYGKEQIRYITIEMPRDDNEEDEKKRIKELHAKNSQRKNDSQSYFMQKSGWSQEKFQTTIQKNRRFLAKLLYYYEQDGICAYTGLSISPELLVSDSTEIDHIIPISISLDDSINNKVLVLSKANQVKGQQTPYDAWMDGSFKKINGKFSNWDDYQKWVESRHFSHKKENNLLETRNIFDSEQVEKFLARNLNDTRYASRLVLNTLQSFFANHETKVRVVNGSFTHTLRKKWGADLDKTRETHHHHAVDATLCAVTPFVKVSRYHYAVKEETGEKVMREIDFETGEIVDEMSYQEFKKSKKYERKTYQVKWPNFREQLKPVNLHPRIKFSHQVDRKANRKLSDATIYSVREKTEVKTLKSGKQKITTDEYTIGKIKDIYTVDGWEAFKKKQDKLLMKDLDEKTYERLLSIAETTPDFQEVEEKNGKVKRVKRSPFAVYCEENDIPAIQKYAKKNNGPLIRSLKYYDGKLNKHINITKDSQGRPVEKTKNGRKVTLQSLKPYRYDIYQDLETKAYYTVQLYYSDLRFVEGKYGITEKEYMKKVAEQTKGQVVRFCFSLQKNDGLEIEWKDSQRYDVRFYNFQSANSINFKGLEQEMMPAENQFKQKPYNNGAINLNIAKYGKEGKKLRKFNTDILGKKHYLYYEKEPKNIIK

SEQ ID NO: 943 - protein, 1150 aa, Enterococcus faecalis
MYSIGLDLGISSVGWSVIDERTGNVIDLGVRLFSAKNSEKNLERRTNRGGRRLIRRKTNRLKDAKKILAAVGFYEDKSLKNSCPYQLRVKGLTEPLSKGEIYKVTLHILKKRGISYLDEDDTEAAKESQDYKEQVRKNAQLLTKYTPGQIQLQRLKENNRVKTGINVQGNYQLNVFKVSAYANELATILKTQQAFYPNELTDDWIALFVQPGIAEEAGLIYRKRPYYHGPGNEANNSPYGRWSDFQKTGEPATNIFDKLIGKDFQGELRASGLSLSAQQYNLLNDLTNLKIDGEVPLSSEQKEYILTELMTKEFTRFGVNDVVKLLGVKKERLSGWRLDKKGKPEIHTLKGYRNWRKIFAEAGIDLATLPTETIDCLAKVLTLNTEREGIENTLAFELPELSESVKLLVLDRYKELSQSISTQSWHRFSLKTLHLLIPELMNATSEQNTLLEQFQLKSDVRKRYSEYKKLPTKDVLAEIYNPTVNKTVSQAFKVIDALLVKYGKEQIRYITIEMPRDDNEEDEKKRIKELHAKNSQRKNDSQSYFMQKSGWSQEKFQTTIQKNRRFLAKLLYYYEQDGICAYTGLPISPELLVSDSTEIDHIIPISISLDDSINNKVLVLSKANQVKGQQTPYDAWMDGSFKKINGKFSNWDDYQKWVESRHFSHKKENNLLETRNIFDSEQVEKFLARNLNDTRYASRLVLNTLQSFFTNQETKVRVVNGSFTHTLRKKWGADLDKTRETHHHHAVDATLCAVTPFVKVSRYHYAVKEETGEKVMREIDFETGEIVNEMSYREFKKSKKYERKTYQVKWPNFREQLKPVNLHPRIKFSHQVDRKANRKLSDATIYSVREKTEVKTLKSGKQKITTDEYTIGKIKDIYTLDGWEAFKKKQDKLLMKDLDEKTYERLLSIAETTPDFQEVEEKNGKVKRVKRSPFAVYCEENDIPAIQKYAKKNNGPLIRSLKYYDGKLNKHINITKDSQGRPVEKTKNGRKVTLQSLKPYRYDIYQDLETKAYYTVQLYYSDLRFVEGKYGITEKEYMKKVAEQTKGQVVRFCFSLQKNDGLEIEWKDSQRYDVRFYNFQSANSINFKGLEQEIMPAENQFKQKPYNNGAINLNIAKYGKEGKKLRKFNTDILGKKHYLFYEKEPKNIIK

SEQ ID NO: 944 - protein, 1150 aa, Enterococcus faecalis; identical to SEQ ID NO: 178

SEQ ID NO: 945 - protein, 1150 aa, Enterococcus faecalis; identical to SEQ ID NO: 179

SEQ ID NO: 946 - protein, 1340 aa, Enterococcus faecium
MKKEYTIGLDIGTNSVGWSVLTDDYRLVSKKMKVAGNTEKSSTKKNFWGVRLFDEGQTAEARRSKRTARRRLARRRQRILELQKIFAPEILKIDEHFFARLNESFLVLDEKKQSRHPVFATIKQEKSYHQTYPTIYHLRQALADSSEKADIRLVYLAMAHLLKYRGHFLIEGELNTENSSVTETFRQFLSTYNQQFSEADDKQTEKLDEAVDCSFVFTEKMSKTKKAETLLKYFPHEKSNGYLSQFIKLMVGNQGNFKNVFGLEEEAKLQFSKETYEEDLEELLEKIGDDYIDLFVQAKNVYDAVLLSEILSDSTKNTRAKLSAGMIRRYDAHKEDLVLLKRFVKENLPKKYRAFFGDNSVNGYAGYIEGHATQEDFYKFVKKELTGIRGSEVFLTKIEQENFLRKQRTFDNGVIPHQIHLTELRAIIANQKKHYPFLKEEQEKLESLLTFKIPYYVGPLAKKQENSPFAWLIRKSEEKIKPWNLPEIVDMEGSAVRFIERMNNTDMYIPHNKVLPKNSLLYQKFSIYNELTKVRYQDERGQMNYFSSIEKKEIFHELFEKNRKVTKKDLQEFLYLKYDIKHAELSGIEKAFNASYTTYHDFLTMSENKREMKQWLEDPELASMFEEIIKTLTVFEDREMIKTRLSHHEATLGKHIIKKLTKKHYTGWGRLSKELIQGIRDKQSNKTILDYLINDDDFPHHRNRNFMQLINDDSLSFKKEIKKAQMITDTENLEEIVKELTGSPAIKKGILQSLKIVDEIVGIMGYEPANIVVEMARENQTTGRGLKSSRPRLKALEESLKDFGSQLLKEYPTDNSSLQKDRLYLYYLQNGRDMYTGAPLDIHRLSDYDIDHIIPRSFTTDNSIDNKVLVSSKENRLKKDDVPSEKVVKKMRSFWYDLYSSKLISKRKLDNLTKIKLTEEDKAGFIKRQLVETRQITKHVAGILHHRFNKAEDTNEPIRKVRIITLKSALVSQFRNRFGIYKVREINEYHHAHDAYLNGVVALALLKKYPQLAPEFVYGEYLKFNAHKANKATVKKEFYSNIMKFFESDTPVCDENGEIFWDKSKSIAQVKKVINHHHMNIVKKTEIQKGGFSKETVEPKKDSSKLLPRKNNWDPAKYGGLGSPNVAYTVAFTYEKGKARKRTNALEGITIMEREAFEQSPVLFLKNKGYEQAEIEMKLPKYALFELENGRKRMVASNKEAQKANSFLLPEHLVTLLYHAKQYDEISHKESFDYVNEHHKEFSEVFARVLEFAGKYTLAEKNIEKLEKIYKENQTDDLAKLASSFVNLMQFNAMGAPADFKFFDVTIPRKRYTSLTEIWQSTIIHQSITGLYETRIRMGK

SEQ ID NO: 947 - protein, 1339 aa, Enterococcus faecium
MKKEYTIGLDIGTNSVGWSVLTDDYRLVSKKMKVAGNTEKSSTKKNFWGVRLFDEGQTAEARRSKRTARRRLARRRQRILELQKIFAPEILKIDEHFFARLNESFLVLDEKKQSRHPVFATIKQEKSYHQTYPTIYHLRQALADSSEKADIRLVYLAMAHLLKYRGHFLIEGELNTENSSVTETFRQFLSTYNQQFSEADDKQTEKLDEAVDCSFVFTEKMSKTKKAETLLKYFPHEKSNGYLSQFIKLMVGNQGNFKNVFGLEEAKLQFSKETYEEDLEELLEKIGDDYIDLFVQAKNVYDAVLLSEILSDSTKNTRAKLSAGMIRRYDAHKEDLVLLKRFVKENLPKKYRAFFGDNSVNGYAGYIEGHATQEDFYKFVKKELTGIRGSEVFLTKIEQENFLRKQRTFDNGVIPHQIHLTELRAIIANQKKHYPFLKEEQEKLESLLTFKIPYYVGPLAKKQENSPFAWLIRKSEEKIKPWNLPEIVDMEGSAVRFIERMINTDMYMPHNKVLPKNSLLYQKFSIYNELTKVRYQDERGQMNYFSSIEKKEIFHELFEKNRKVTKKDLQEFLYLKYDIKHAELSGIEKAFNASYTTYHDFLTMSENKREMKQWLEDPELASMFEEIIKTLTVFEDREMIKTRLSHHEATLGKHIIKKLTKKHYTGWGRLSKELIQGIRDKQSNKTILDYLINDDDFPHHRNRNFMQLINDDSLSFKKEIKKAQMITDTENLEEIVKELTGSPAIKKGILQSLKIVDEIVGIMGYEPANIVVEMARENQTTGRGLKSSRPRLKALEESLKDFGSQLLKEYPTDNSSLQKDRLYLYYLQNGRDMYTGAPLDIHRLSDYDIDHIIPRSFTTDNSIDNKVLVSSKENRLKKDDVPSEKVVKKMRSFWYDLYSSKLISKRKLDNLTKIKLTEEDKAGFIKRQLVETRQITKHVAGILHHRFNKAEDTNEPIRKVRIITLKSALVSQFRNRFGIYKVREINEYHHAHDAYLNGVVALALLKKYPQLAPEFVYGEYLKFNAHKANKATVKKEFYSNIMKFFESDTPVCDENGEIFWDKSKSIAQVKKVINHHHMNIVKKTEIQKGGFSKETVEPKKDSSKLLPRKNNWDPAKYGGLGSPNVAYTVAFTYEKGKARKRTNALEGITIMEREAFEQSPVLFLKNKGYEQAEIEMKLPKYALFELENGRKRMVASNKEAQKANSFLLPEHLVTLLYHAKQYDEISHKESFDYVNEHHKEFSEVFARVLEFAGKYTLAEKNIEKLEKIYKENQTDDLAKLASSFVNLMQFNAMGAPADFKFFDVTIPRKRYTSLTEIWQSTIIHQSITGLYETRIRMGK

SEQ ID NO: 948 - protein, 1340 aa, Enterococcus faecium
MKKEYTIGLDIGTNSVGWSVLTDDYRLVSKKMKVAGNTEKSSTKKNFWGVRLFDEGQTAEARRSKRTARRRLARRRQRILELQKIFAPEILKIDEHFFARLNESFLVLDEKKQSRHPVFATIKQEKSYHQTYPTIYHLRQALADSSEKADIRLVYLAMAHLLKYRGHFLIEGELNTENSSVTETFRQFLSTYNQQFSEADDKQTEKLDEAVDCSFVFTEKMSKTKKAETLLKYFPHEKSNGYLSQFIKLMVGNQGNFKNVFGLEEEAKLQFSKETYEEDLEELLEKIGDDYIDLFVQAKNVYDAVLLSEILSDSTKNTRAKLSAGMIRRYDAHKEDLVLLKRFVKENLPKKYRAFFGDNSVNGYAGYIEGHATQEDFYKFVKKELTGIRGSEVFLTKIEQENFLRKQRTFDNGVIPHQIHLTELRAIIANQKKHYPFLKEEQEKLESLLTFKIPYYVGPLAKKQENSPFAWLIRKSEEKIKPWNLPEIVDMEGSAVRFIERMINTDMYIPHNKVLPKNSLLYQKFSIYNELTKVRYQDERGQMNYFSSIEKKEIFHELFEKNRKVTKKDLQEFLYLKYDIKHAELSGIEKAFNASYTTYHDFLTMSENKREMKQWLEDPELASMFEEIIKTLTVFEDREMIKTRLSHHEATLGKHIIKKLTKKHYTGWGRLSKELIQGIRDKQSNKTILDYLINDDDFPHHRNRNFMQLINDDSLSFKKEIKKAQMITDTENLEEIVKELTGSPAIKKGILQSLKIVDEIVGIMGYEPANIVVEMARENQTTGRGLKSSRPRLKALEESLKDFGSQLLKEYPTDNSSLQKDRLYLYYLQNGRDMYTGAPLDIHRLSDYDIDHIIPRSFTTDNSIDNKVLVSSKENRLKKDDVPSEKVVKKMRSFWYDLYSSKLISKRKLDNLTKIKLTEEDKAGFIKRQLVETRQITKHVAGILHHRFNKAEDTNEPIRKVRIITLKSALVSQFRNRFGIYKVREINEYHHAHDAYLNGVVALALLKKYPQLAPEFVYGEYLKFNAHKANKATVKKEFYSNIMKFFESDTPVCDENGEIFWDKSKSIAQVKKVINHHHMNIVKKTEIQKGGFSKETVEPKKDSSKLLPRKNNWDPAKYGGLGSPNVAYTVAFTYEKGKARKRTNALEGITIMEREAFEQSPVLFLKNKGYEQAEIEMKLPKYALFELENGRKRMVASNKEAQKANSFLLPEHLVTLLYHAKQYDEISHKESFDYVNEHHKEFSEVFARVLEFAGKYTLAEKNIEKLEKIYKENQTDDLAKLASSFVNLMQFNAMGAPADFKFFDVTIPRKRYTSLTEIWQSTIIHQSITGLYETRIRMGK

SEQ ID NO: 949 - protein, 1340 aa, Enterococcus faecium
MKKEYTIGLDIGTNSVGWSVLTDDYRLVSKKMKVAGNTEKSSTKKNFWGVRLFDEGQTAEARRSKRTARRRLARRRQRILELQKIFAPEILKIDEHFFARLNESFLVLDEKKQSRHPVFATIKQEKSYHQTYPTIYHLRQALADSSEKADIRLVYLAMAHLLKYRGHFLIEGELNTENSSVTETFRQFLSTYNQQFSEADDKQTEKLDEAVDCSFVFTEKMSKTKKAETLLKYFPHEKSNGYLSQFIKLMVGNQGNFKNVFGLEEEAKLQFSKETYEEDLEELLEKIGDDYIDLFVQAKNVYDAVLLSEILSDSTKNTRAKLSAGMIRRYDAHKEDLVLLKRFVKENLPKKYRAFFGDNSVNGYAGYIEGHATQEDFYKFVKKELTGIRGSEVFLTKIEQENFLRKQRTFDNGVIPHQIHLTELRAIIANQKKHYPFLKEEQEKLESLLTFKIPYYVGPLAKKQENSPFAWLIRKSEEKIKPWNLPEIVDMEGSAVRFIERMINTDMYMPHNKVLPKNSLLYQKFSIYNELTKVRYQDERGQMNYFSSIEKKEIFHELFEKNRKVTKKDLQEFLYLKYDIKHAELSGIEKAFNASYTTYHDFLTMSENKREMKQWLEDPELASMFEEIIKTLTVFEDREMIKTRLSHHEATLGKHIIKKLTKKHYTGWGRLSKELIQGIRDKQSNKTILDYLINDDDFPHHRNRNFMQLINDDSLSFKKEIKKAQMITDTENLEEIVKELTGSPAIKKGILQSLKIVDEIVGIMGYEPANIVVEMARENQTTGRGLKSSRPRLKALEESLKDFGSQLLKEYPTDNSSLQKDRLYLYYLQNGRDMYTGAPLDIHRLSDYDIDHIIPRSFTTDNSIDNKVLVSSKENRLKKDDVPSEKVVKKMRSFWYDLYSSKLISKRKLDNLTKIKLTEEDKAGFIKRQLVETRQITKHVAGILHHRFNKAEDTNEPIRKVRIITLKSALVSQFRNRFGIYKVREINEYHHAHDAYLNGVVALALLKKYPQLAPEFVYGEYLKFNAHKANKATVKKEFYSNIMKFFESDTPVCDENGEIFWDKSKSIAQVKKVINHHHMNIVKKTEIQKGGFSKETVEPKKDSSKLLPRKNNWDPAKYGGLGSPNVAYTVAFTYEKGKARKRTNALEGITIMEREAFEQSPVLFLKNKGYEQAEIEMKLPKYALFELENGRKRMVASNKEAQKANSFLLPEHLVTLLYHAKQYDEISHKESFDYVNEHHKEFSEVFARVLEFAGKYTLAEKNIEKLEKIYKENQTDDLAKLASSFVNLMQFNAMGAPADFKFFDVTIPRKRYTSLTEIWQSTIIHQSITGLYETRIRMGK

SEQ ID NO: 950 - protein, 1339 aa, Enterococcus faecium
MKKEYTIGLDIGTNSVGWSVLTDDYRLVSKKMKVAGNTEKSSTKKNFWGVRLFDEGQTAEARRSKRTARRRLARRRQRILELQKIFAPEILKIDEHFFARLNESFLVLDEKKQSRHPVFATIKQEKSYHQTYPTIYHLRQALADSSEKADIRLVYLAMAHLLKYRGHFLIEGELNTENSSVTETFRQFLSTYNQQFSEADDKQTEKLDEAVDCSFVFTEKMSKTKKAETLLKYFPHEKSNGYLSQFIKLMVGNQGNFKNVFGLEEAKLQFSKETYEEDLEELLEKIGDDYIDLFVQAKNVYDAVLLSEILSDSTKNTRAKLSAGMIRRYDAHKEDLVLLKRFVKENLPKKYRAFFGDNSVNGYAGYIEGHATQEDFYKFVKKELTGIRGSEVFLTKIEQENFLRKQRTFDNGVIPHQIHLTELRAIIANQKKHYPFLKEEQEKLESLLTFKIPYYVGPLAKKQENSPFAWLIRKSEEKIKPWNLPEIVDMEGSAVRFIERMINTDMYIPHNKVLPKNSLLYQKFSIYNELTKVRYQDERGQMNYFSSIEKKEIFHELFEKNRKVTKKDLQEFLYLKYDIKHAELSGIEKAFNASYTTYHDFLTMSENKREMKQWLEDPELASMFEEIIKTLTVFEDREMIKTRLSHHEATLGKHIIKKLTKKHYTGWGRLSKELIQGIRDKQSNKTILDYLINDDDFPHHRNRNFMQLINDDSLSFKKEIKKAQMITDTENLEEIVKELTGSPAIKKGILQSLKIVDEIVGIMGYEPANIVVEMARENQTTGRGLKSSRPRLKALEESLKDFGSQLLKEYPTDNSSLQKDRLYLYYLQNGRDMYTGAPLDIHRLSDYDIDHIIPRSFTTDNSIDNKVLVSSKENRLKKDDVPSEKVVKKMRSFWYDLYSSKLISKRKLDNLTKIKLTEEDKAGFIKRQLVETRQITKHVAGILHHRFNKAEDTNEPIRKVRIITLKSALVSQFRNRFGIYKVREINEYHHAHDAYLNGVVALALLKKYPQLAPEFVYGEYLKFNAHKANKATVKKEFYSNIMKFFESDTPVCDENGEIFWDKSKSIAQVKKVINHHHMNIVKKTEIQKGGFSEETVEPKKDSSKLLPRKNNWDPAKYGGLGSPNVAYTVAFTYEKGKARKRTNALEGITIMEREAFEQSPVLFLKNKGYEQAEIEMKLPKYALFELENGRKRMVASNKEAQKANSFLLPEHLVTLLYHAKQYDEISHKESFDYVNEHHKEFSEVFARVLEFAGKYTLAEKNIEKLEKIYKENQTDDLAKLASSFVNLMQFNAMGAPADFKFFDVTIPRKRYTSLTEIWQSTIIHQSITGLYETRIRMGK

SEQ ID NO: 951 - protein, 1340 aa, Enterococcus faecium
MKKEYTIGLDIGTNSVGWSVLTDDYRLVSKKMKVAGNTEKSSTKKNFWGVRLFDEGQTAEARRSKRTARRRLARRRQRILELQKIFAPEILKIDEHFFARLNESFLVLDEKKQSRHPVFATIKQEKSYHQTYPTIYHLRQALADSSEKADIRLVYLAMAHLLKYRGHFLIEGELNTENSSVTETFRQFLSTYNQQFSEADDKQTEKLDEAVDCSFVFTEKMSKTKKAETLLKYFPHEKSNGYLSQFIKLMVGNQGNFKNVFGLEEEAKLQFSKETYEEDLEELLEKIGDDYIDLFVQAKNVYDAVLLSEILSDSTKNTRAKLSAGMIRRYDAHKEDLVLLKRFVKENLPKKYRAFFGDNSVNGYAGYIEGHATQEDFYKFVKKELTGIRGSEVFLTKIEQENFLRKQRTFDNGVIPHQIHLTELRAIIANQKKHYPFLKEEQEKLESLLTFKIPYYVGPLAKKQENSPFAWLIRKSEEKIKPWNLPEIVDMEGSAVRFIERMINTDMYIPHNKVLPKNSLLYQKFSIYNELTKVRYQDERGQMNYFSSIEKKEIFHELFEKNRKVTKKDLQEFLYLKYDIKHAELSGIEKAFNASYTTYHDFLTMSENKREMKQWLEDPELASMFEEIIKTLTVFEDREMIKTRLSHHEATLGKHIIKKLTKKHYTGWGRLSKELIQGIRDKQSNKTILDYLINDDDFPHHRNRNCMQLINDDSLSFKKEIKKAQMITDTENLEEIVKELTGSPAIKKGILQSLKIVDEIVGIMGYEPANIVVEMARENQTTGRGLKSSRPRLKALEESLKDFGSQLLKEYPTDNSSLQKDRLYLYYLQNGRDMYTGAPLDIHRLSDYDIDHIIPRSFTTDNSIDNKVLVSSKENRLKKDDVPSEKVVKKMRSFWYDLYSSKLISKRKLDNLTKIKLTEEDKAGFIKRQLVETRQITKHVAGILHHRFNKAEDTNEPIRKVRIITLKSALVSQFRNRFGIYKVREINEYHHAHDAYLNGVVALALLKKYPQLAPEFVYGEYLKFNAHKANKATVKKEFYSNIMKFFESDTPVCDENGEIFWDKSKSIAQVKKVINHHHMNIVKKTEIQKGGFSKETVEPKKDSSKLLPRKNNWDPTKYGGLGSPNVAYTVAFTYEKGKARKRTNALEGITIMEREAFEQSPVLFLKNKGYEQAEIEMKLPKYALFELENGRKRMVASNKEAQKANSFLLPEHLVTLLYHAKQYDEISHKESFDYVNEHHKEFSEVFARVLEFAGKYTLAEKNIEKLEKIYKENQTDDLAKLASSFVNLMQFNAMGAPADFKFFDVTIPRKRYTSLTEIWQSTIIHQSITGLYETRIRMGK

SEQ ID NO: 952 - protein, 892 aa, Enterococcus faecium
MTFKIPYYVGPLAKKQENSPFAWLIRKSEEKIKPWNLPEIVDMEGSAVRFIERMINTDMYMPHNKVLPKNSLLYQKFSIYNELTKVRYQDERGQMNYFSSIEKKEIFHELFEKNRKVTKKDLQEFLYLKYDIKHAELSGIEKAFNASYTTYHDFLTMSENKREMEQWLEDPELASMFEEIIKTLTVFEDREMIKTRLSHHKATLGKHIIKKLTKKHYTGWGRLSKELIQGIRDKQSNKTILDYLINDDDFPHHRNRNFMQLINDDSLSFKKEIKKAQMITDTENLEEIVKELTGSPAIKKGILQSLKIVDEIVGIMGYEPANIVVEMARENQTTGRGLKSSRPRLKALEESLKDFGSQLLKEYPTDNSSLQKDRLYLYYLQNGRDMYTGAPLDIHRLSDYDIDHIIPRSFTTDNSIDNKVLVSSKENRLKKDDVPSEKVVKKMRSFWYDLYSSKLISKRKLDNLTKIKLTEEDKAGFIKRQLVETRQITKHVAGILHHRFNKAEDTNEPIRKVRIITLKSALVSQFRNRFGIYKVREINEYHHAHDAYLNGVIALALLKKYPQLAPEFVYGEYLKFNAHKANKATVKKEFYSNIMKFFESDTPVCDENGEIFWDKSKSIAQVKKVINHHHMNIVKKTEIQKGGFSKETVEPKKDSSKLLPRKNNWDPAKYGGLGSPNVAYTVAFTYEKGKARKRTNALEGITIMEREAFEQSPVLFLKNKGYEQAEIEMKLPKYALFELENGRKRMVASNKEAQKANSFLLPEHLVTLLYHAKQYDEISHKESFDYVNEHHKEFSEVFARVLEFAGKYTLAEKNIEKLEKIYKENQTDDLAKLASSFVNLMQFNAMGAPADFKFFDVTIPRKRYTSLTEIWQSTIIHQSITGLYETRIRMGK

SEQ ID NO: 953 - protein, 1336 aa, Enterococcus hirae
MTKDYTIGLDIGTNSVGWAVLTDDYQLMKRKMSVHGNTEKKKIKKNFWGARLFDEGQTAEFRRTKRTNRRRLARRKYRLSKLQDLFAEELCKQDDCFFVRLEESFLVPEEKQYKPASIFPTLEEEKEYYQKYPTIYHLRQKLVDSTEKEDLRLVYLALAHLLKYRGHFLFEGDLDTENTSIEESFRVFLEQYSKQSDQPLIVHQPVLTILTDKLSKTKKVEEILKYYPTEKINSFFAQCLKLIVGNQANFKRIFDLEAEVKLQFSKETYEEDLESLLEKIGDEYLDIFLQAKKVHDAILLSEIISSTVKHTKAKLSSGMVERYERHKADLAKFKQFVKENVPQKATVFFKDTTKNGYAGYIKGKTTQEEFYKFVKKELSGVVGSEPFLEKIDQETFLLKQRTYTNGVIPHQVHLIELKAIIDQQKQHYPFLEEAGPKIIALFKFRIPYYVGPLAKEQEASSFAWIERKTAEKINPWNFSEVVDIEKSAMRFIQRMTKQDTYLPTEKVLPKNSLLYQKYMIFNELTKVSYKDERGVKQYFSGDEKQQIFKQLFQKERGKITVKKLQNFLYTHYHIENAQIFGIEKAFNASYSTYHDFMKLAKTNQKAMQEWLEQPEMEPIFEDIVKILTIFEDRQMIKHQLSKYQEVFGEKLLKEFARKHYTGWGRFSAKLIHGIRDRKTNKTILDYLINDDDVPANRNRNLMQLINDEHLSFKEEIAKATVFSKHKSLVDVIQDLPGSPAIKKGIWQSLKIVEELIAIIGYKPKNIVIEMARENQKTHRTSPRLKALENGLKQIGSTLLKEQPTDNKALQKERLYLYYLQNGRDMYTGEPLEIENLHQYEVDHIIPRSFIVDNSIDNKVLVASKQNQKKRDDVPKKQIVNEQRIFWNQLKEAKLISPKKYAYLTKIELTPEDKARFIQRQLVETRQITKHVANILHQSFNQEEEGTDCDGVQIITLKATLTSQFRQTFGLYKVREINPHHHAHDAYLNGFIANVLLKRYPKLAPEFVYGKYVKYSLARENKATAKKEFYSNILKFLESDEPFCDENGEIYWEKSHHLPRIKKVLSSHQVNVVKKVEQQKGGFYKETVNSKEKPDKLIERKNNWDVTKYGGFGSPVIAYAIAFVYAKGKTQKKTRAIEGITIMEQAAFEKDPTTFLKEKGFPQVTEFIKLPKYTLFEFDNGRRRFLASHKESQKGNPFILSDQLVTLLYHAQHYDKITYQESFDYVNTHLSDFSAILTEVLAFAEKYTLADKNIERIQELYEENKYGETSMIAQSFLQLLQFNAIGAPADFKFFGVTIPRKRYTSLTEIWDATIIYQSVTGLYETRIRMGDLWAGEQ

SEQ ID NO: 954 - protein, 116 aa, Enterococcus sp.
MYSIGLDLGISSVGWSVIDERTGNVIDLGVRLFSAKNSEKNLERRTNRGGRRLIRRKTNRLKDAKKILAAVGFYEDKSLKNSCPYQLRVKGLTELLSKGEIYKVTLHILKNVELVT

SEQ ID NO: 955 - protein, 1391 aa, Eubacterium sp.
MENKQYYIGLDVGTNSVGWAVTDTSYNLLRAKGKDMWGARLFDEAKTAVERRTKRTSRRRSEREKARKAMLKELFADEINKVDPNFFIRLEESKFFLDDRSENNRQRYTLFNDAKFTDKDYYEKYKTIFHLRSALINSDEKFDVRLVFLAILNLFSHRGHFLNASLKGDGEIQGVDIFYNDLYEVCEEFEIDLPQISNIDNFEKILSQKGKSRTKILEELSEELSISKKEKIKYSLLKLICGMKIKVVDIYADEDIQEDDKKKDLGFRESDYEKSSLEVKEIIGDDHFELIERAKAVHDIGLLANIIGNSKYLCEARVEAYDNHHKDLQKIKELLKKYDIKAYTDMFRKMTDKNYSAYVGSVNSNIAKERRSVDNRKIEDLYEYIKKIALKNISDDNEDKIEILKKIETGEFLKKQLTASNGVIPNQLQSRELRAILKKAENYLPFLKEKGEKNLTVSEMIIQLFEFQIPYYVGPLDKNPKKDKNANSWAVIPSGGRILPWNFEDKVDVKGSRKEFIEKMVRKCTYLSEEHTLPKQSLLYEKFMVLNEINNIKIDGEKISVEAKQKIYNDLFMKGKKVSQKAIKQELISLNIMSKDSVLSGIDTVCNAYLSSIAKFRGVFDENVNNQSTIDMIEDIIFLKTVYSDEKRFVKEEIVEKYGDEIDKDKIKRILGFKFSNWGNISKSFLELEGADVGTGEIRSIIQSLWETNFNLMELLSSRFTYMDELEKRVKKLEKPLSEWTIEDLDDMYLSSPVKRMIWQSMKIVDEIQTVIGYAPKRIFVEMTRSEGEKVRTKSRKDRLKELYSAIKEDSKQWVKELDAKDESYFRSKKMYLYYLQKGRCMYSGEVIELDKLMDDNLYDIDHIYPRSFVKDDSLDNLVLVKKEINNRKQNDPITPQIQASCQGFWKVLHEQGFISNEKYSRLTRKTQEFSDEEKLSFINRQIVETGQATKCMAQILQKSMGEDVDVVFSKARLVSEFRHKFELFKSRLINDFHHANDAYLNIVVGNSYFVKFTRNPANFIKDARKNPDNPAYKYHMDRFFERDVKSKSEVAWIGQSEGNAGTIAIVKKTMSKNSPLITKKVEEGHGSITKETIVGVKEIKFGRNKVEKADKTPKKANLQAYRPIKTSDERLCNILRYGGRTSISISGYCLVEYVKKRKTIRSLEAIPVYLGRKDSLSEEKLLNYFRYNLNDGGKDSVSDIRLCLPFISTNSLVKIDGYLYYLGGKNDDRIQLYNAYQLKMKKEEVEYIRKIEKAVSMSKFDEIDREKNPVLTEEKNIELYNKIQDKFENTVFSKRMSLVKYNKKDLSFGDFLKNKKSKFEEIDLEKQCKVLYNIIFNLSNLKEVDLSDIGGSKSTGKCRCKKNITNYKEFKLIQQSITGLYSCEKDLMTI

SEQ ID NO: 956 - protein, 1391 aa, Eubacterium yurii
MENKQYYIGLDVGTNSVGWAVTDTSYNLLRAKGKDMWGARLFEKANTAAERRTKRTSRRRSEREKARKAMLKELFADEINRVDPSFFIRLEESKFFLDDRSENNRQRYTLFNDATFTDKDYYEKYKTIFHLRSALINSDEKFDVRLVFLAILNLFSHRGHFLNASLKGDGDIQGMDVFYNDLVESCEYFEIELPRITNIDNFEKILSQKGKSRTKILEELSEELSISKKDKSKYNLIKLISGLEASVVELYNIEDIQDENKKIKIGFRESDYEESSLKVKEIIGDEYFDLVERAKSVHDMGLLSNIIGNSKYLCEARVEAYENHHKDLLKIKELLKKYDKKAYNDMFRKMTDKNYSAYVGSVNSNIAKERRSVDKRKIEDLYKYIEDTALKNIPDDNKDKIEILEKIKLGEFLKKQLTASNGVIPNQLQSRELRAILKKAENYLPFLKEKGEKNLTVSEMIIQLFEFQIPYYVGPLDKNPKKDNKANSWAKIKQGGRILPWNFEDKVDVKGSRKEFIEKMVRKCTYISDEHTLPKQSLLYEKFMVLNEINNIKIDGEKISVEAKQKIYNDLFVKGKKVSQKDIKKELISLNIMDKDSVLSGTDTVCNAYLSSIGKFTGVFKEEINKQSIVDMIEDIIFLKTVYGDEKRFVKEEIVEKYGDEIDKDKIKRILGFKFSNWGNLSKSFLELEGADVGTGEVRSIIQSLWETNFNLMELLSSRFTYMDELEKRVKKLEKPLSEWTIEDLDDMYLSSPVKRMIWQSMKIVDEIQTVIGYAPKRIFVEMTRSEGEKVRTKSRKDRLKELYNGIKEDSKQWVKELDSKDESYFRSKKMYLYYLQKGRCMYSGEVIELDKLMDDNLYDIDHIYPRSFVKDDSLDNLVLVKKEINNRKQNDPITPQIQASCQGFWKILHDQGFMSNEKYSRLTRKTQEFSDEEKLSFINRQIVETGQATKCMAQILQKSMGEDVDVVFSKARLVSEFRHKFELFKSRLINDFHHANDAYLNIVVGNSYFVKFTRNPANFIKDARKNPDNPVYKYHMDRFFERDVKSKSEVAWIGQSEGNSGTIVIVKKTMAKNSPLITKKVEEGHGSITKETIVGVKEIKFGRNKVEKADKTPKKPNLQAYRPIKTSDERLCNILRYGGRTSISISGYCLVEYVKKRKTIRSLEAIPVYLGRKDSLSEEKLLNYFRYNLNDGGKDSVSDIRLCLPFISTNSLVKIDGYLYYLGGKNDDRIQLYNAYQLKMKKEEVEYIRKIEKAVSMSKFDEIDREKNPVLTEEKNIELYNKIQDKFENTVFSKRMSLVKYNKKDLSFGDFLKNKKSKFEEIDLEKQCKVLYNIIFNLSNLKEVDLSDIGGSKSTGKCRCKKNITNYKEFKLIQQSITGLYSCEKDLMTI

SEQ ID NO: 957 - protein, 1142 aa, Facklamia hominis
MYSVGLDIGIASCGYSIINDVNGNIVELGTLLFKSRNSDNNEERRTNRGSRRLINRRRTRLDDGKKLLAEKGFKQDSKLKHVCPYELRVKGLHEKLTQGEIYKVVLHILKKRGISYLDESDENSSGIDGASYKDQVNLNLNLQKELTPGQIQLKRLKENGRIKSGVTFENGYQLNVFSVSAYANELNKILTKQSEYYSEIDQIWIDRFTKNGYRKEAGLVYRKRPYYDGPGNEKNNSIYGRWANFKEDGHPKENIFDQLIGLDSVDSTQVRASASTLTAQKYNLLNDLNNLTIIEDDRKFTTDEKVSIINYLMTQDITRFGPKELAKFYQLEVDQIRGWRIDNKGNPEIHSLKVYRDWKKIFNTSSIDLTSIQTWVVDELANVITLNTEIPSTLATLKIKIPDIDQQILNFVENNFYELKKKTSKNSWHSFSLKTLNILIPELLNTSEEQNTILERLNLKFDLKNKYAEKNQIPVKELLEQIYNPTVTKSVHQSIKLFNEIIEKYGKNNISYVTIEMPRDKNDQDQKDTIKRINKLNSERKNDSEKYFLERSGWDTIRFESALKKPRFAEKLLFYYEQKGKCAYSGQDILAESLLNESCEVDHIIPLSISFDDSIHNKVLVTASSNQEKGQRTPYMAFIDGAKLGQSWDDFVAWVNSCGFHRKKVQNLLYEENIFNPDVQRGFVSRNLNDTRYASRIVLNAIQSFFYKQKDLTKVKVVNGSFTHTLRKKWGSSLDKNRDTYHHHAVDATLCAVTPFINIVKYEFFEEDGIKYMVDLTTGEKVAYSDYKKMKFYDKRAYVPIWDGFIKQLTPANLYPKIKFSHQVDSKWNRKISDATIYSTRKIVETKINKKGVAKETVKDIVIDKIKDIYTPEGWRKFKEKQDKLLMKNFDEKTYNKLIKIAKEYPEKKEVQTSNGKVSLVEVSPFKMYCEEQNVPAIRKYSKKGNGPYIRSLKFYDKELGKHINITKDSYGNDIERTIRNKKIILKNQNSWRTDVYYNSVNNCYELLGIKYCHLKFYRGKYGIPKSIYDELKKEDEISSESVFKFSLYRHDRVRFEKDGEYIEALFGSKNESNKNYLELSPIDKNKWLSKENVKFFGEVAASGRFIKGLKPGIKVIKQSTDYMGHVYAIHQEKLKFVLSDA

SEQ ID NO: 958 - protein, 1347 aa, Finegoldia magna
MKSEKKYYIGLDVGTNSVGWAVTDEFYNILRAKGKDLWGVRLFEKAKTAADTRTFRSGRRRNDRKGMRLQILREIFEDEIKKVDKDFYDRLDESKFWAEDKKVSGKYSLFNDKNFSDKQYFEKFPTIFHLRKYLMEEHGKVDIRYYFLAINQMMKRRGHFLIDGQISHVTDDKPLKEQLILLINDLLKIELEEELMDSIFEILADVNEKRTDKKNNLKELIKGQDFNKQEGNILNSIFESIVTGKAKIKNIISDEDILEKIKEDNKEDFVLTGDSYEENLQYFEEVLQENITLFNTLKSTYDFVILQSILKGKSTLSDAQVERYDEHKKDLEILKKVIKKYDEDGKLFKQVFKEDNGNGYVSYIGYYLNKNKKITAKKKISNIEFTKYVKGILEKQCDCEDEAVKYLLGKIEQENFLLKQISSINSVIPHQIHLFELDKILENLAKNYPSFNNKKEEFTKIEKIRKTFTFRIPYYVGPLNDYHKNNGGNAWIFRNKGEKIRPWNFEKIVDLHKSEEEFIKRMLNQCTYLPEETVLPKSSILYSEYMVLNELNNLRIKGKPLDTDVKLKLIEELFKKKTKVTLKSIRDYMIRNNFADKEDFDNSEKNLEIVSNMKSYIDFNNILGDKFELEMVEDLIEKITIHTGNKTLLKKYIEETYPDLSSSQIQKIINLKYKDWGRLSRKLLDGIKGRNKTDDVNTVINFMRNSSDNLMQIIEGKNYSFNEYIDNLRKKYIPQEISYEVVENLYVSPSVKKMIWQVIRVTEEITKVMGYDPDKIFIEMAKSEEEKKTTISRKNKLLDLYKAIKKDERDSQYEKLLTGLNKLDESELRSKKLYLYYTQMGRDMYTGEKIDLDKLFDSTHYDKDHIIPQSMKKDDSIINNLVLVNKNANQTTKGNIYPVPSSIRNNPDIYNYWKYLMEKEFISKEKYNRLIRNTPLTNEELGVFINRQLVETRQSTKAIKELFEKFYQKSKIIPVKASLASDLRKDMNTLKSREVNDLHHAHDAFLNIVAGDVWNREFTSNPINYVNENREGDKVKYSLSKYFTRPRKSKGKVIWTPEKGRKLIVDTLNKPSVLISNESHVKKGELFNATISGKKDYKKGKIYLPLKKDDRLKDVSKYGGYKAINGAFFFLVEHTKSKKRIRSIELFPLHLLSKFYEDKNTVLDYAINVLQLQDPKIIIDKINYRTEIIIDNFSYLISTKSNDGSITVKPNEQMYWRVDEISNLKKIENKYKKDAILTEEDRKIMESYIDKIYQQFKAGKYKNRRTTDTIIEKYEIIDLDTLDNKQLYQLLVAFISLSYKTSNNAVDFTVIGLGTECGKPRITNLPDNTYLVYKSITGIYEKRIRIK

SEQ ID NO: 959 - protein, 1348 aa, Finegoldia magna; identical to SEQ ID NO: 222

SEQ ID NO: 960 - protein, 1516 aa, Flavobacteriaceae bacterium
MLKQQKDKIIGMNKKILGLDLGTNSIGWALVKQDLENKYGEIIGCGSRIIPMSQDVLGKFDAGISISQTAERTNYRSVRKLIQRNTLRRERLHRVLHQLDFLPKHYNDSIDFEKKLGQFKTDKETKLNYFVNQHGKHEFLFKDSFNEMVKEFKEEQPELFYIKNNGKETKIPYDWTIYYLRKKALSKKISKEELSWLVLNFNQKRGYYQLRGEIDEEKEKNKRYEKLYVSEVVKTNNTIKKTGEYLYDIYFDNGWKYEKQTTKPQDWLHKHKEFIITTTTLKNGETKRTFKTVDSEKDWIAIKSKTEQDIKESNKTVGAFIYDTLLKNPTQKIRGSLVKTIERKFYREEFEKILKEQIKHRPEINVNTAIGKENYTKCVTELYPRNEAHANNILTNDFNYLFTKDILFYQRPLKSKKSEIANCQYEYRTYIKKKEKTGKEERVKQPLKATPKSHPLFQEFRLWQFIHNLKIYIRETTVGNKPLFDVDITDTFFTSENDWATLFEYLNNKKEIEQKHVLEYLVSKKIISKSEKTDYRWNYVEDKKYPGNETRVDFINRLKKVENLNVDEFLTSELEFKLWHIIYSVTDKNEYEKALENFAIRQNIDKDSFVNSFKKFPPFKSDYGAYSTKAIKKLLPLMRLGKFWDGSEIPKVVVEKITDIKTRLTSVNYDESLFKKDEKKILETIVDDITPKQLLKSFVKLKGKNHLAGLNTYQACYLVYERHSESSDITQWENPDDIDSFLNHFKQHSLRNPIVEQVVTETLRTVRDIWKYYGNGSPNYFNEIHIELGREMKNPADKRKQMSAKINENENTNQRIKGILQELMNDGVQDIKPYSPSQQEILKIYEEGISQNPNVDYSKVSEDEITKIKKSNNPTLKEIQRYKLWLEQKYISPYTGKPIPLSELFTPAYQIEHIIPQSRYFDNSLSNKIICESEVNEDKSNKTAYEYLKTNGGSIVHGHHLLSLKEYEDHCQHYFKKNRTKLKNLLSEEIPEGFINRQLNDSRYISKLIKGLLSNIVREENEQEATSKNIVPVTGSITSKLKQDWGLNDKWNEIIAPRFKRLNKMTNSNDFGYFDEKINTFRIQVPDAISRGFNKKRIDHRHHTLDALVIACCTKKHIQYLNSLNNEIIKHELKPSILIKNAQGDYTKHFMLPWNNFPIDCKNAIENTIVSFKQNLRVINKTSNKYQSYKDENGNLRLGKDGKPKKGLTKQTKGNNWAVRKAMHEDTFYGEIVDGENKGKLKIKTLLDTSFDVKKIEDKVLDKSIRTILINYLKQDKYKNLSKPHEEAFSPNGIIEMNKNIISLNNNIPHKPIKRVTLKHEKGKKFSIKTLLDKKTKFAKSATGTNVFFCIYKNINGKIKYHTPSFEEIIEIQKQEFEIKYKSKLNVPETLFDKKESFELLFYLQPNDLVYLPNDEELKNRQLIDFNNLNKKQIKRIYKFTDGSGTTANFIPYQVAKVIFNLNKKEQAKSSFKYPIQNEFGVGSPQSKNQKSIEGILIKERCIKLKIDRLGNISKA

SEQ ID NO: 961 - protein, 1629 aa, Francisella sp.
  cf
MNFKILPIAIDLGVKNTGVFSAFYQKGTSLERLDNKNGKVYELSKDSYTLLMNNRTARRHQRRGIDRKQLVKRLFKLIWTEQLNLEWDKDTQQAISFLFNRRGFSFITDGYSPEYLNIVPEQVKAILMDIFDDYNGEDDLDSYLKLATEQESKISEIYNKLMQKILEFKLRKLCTDIKDDKVSTKTLKEITSYEFELLADYLANYSEILKTQKFSYTDKQGNLKELSYYHHDKYNIQEFLKRHATINIQILDTLLTDDLDIWNFNFEKFDFDKNEEKLQNQEDKDHIQAHLHHFVFAVNKIKSEMASGGRHRSQYFQEITNVLDENNHQEGYLKNFCENLHNKKYSNLSVKNLVNLIGNLSNLELKPLRKYFNDKIHAKADHWDEQKFTETYCHWILGEWRVGVKDQDKKDGAKYSYKDLCNELKQKVTKAGLVDFLLELDPCRTIPPYLDNNNRKPPKCQSLILNPKFLDNQYPNWQQYLQELKKLQSIQNYLESFETDLKVLKSSKDQPYFVEYRSSNQQIASGQRDYKDLDARILQFIFDRVKASDELLLNEIYFQAKKLKQKASSELEKLESSKKLDEVIANSQLSQILKSQHTNGIFEQGTFLHLVCKYYKQRQRARDSRLYIMPEYRYDKKLHKYNNTGRFDDDNQLLTYCNHKPRQKRYQLLNDLAGVLQVSPNFLKDKIGSDDDLFISKWLVEHIRGFKKACEDSLKIQKDNRGLLNHKINIARNTKGKCEKEIFNLICKIEGSEDKKGNYKHGLAYELGVLLFGEPNEASKPEFDRKIKKFNSIYSFAQIQQIAFAERKGNANTCAVCSADNAHRMQQIKITEPVEDNKDKIILSAKAQRLPAITTRIVDGAVKKMATILAKNIVDDNWQNIKQVLSAKHQLHIPIITESNAFEFEPALADVKGKSLKDRRKKALERISPENIFKDKNNRIKEFAKGISAYSGANLTDGDFDGAKEELDHIIPRSHKKYGTLNDEANLICVTRGDNKNKGNRIFCLRDLANNYKLKQFETTDDLEIEKKIADTIWDANKKDFKFGNYRSFINLTPQEQKAFRHALFLADENPIKQAVIRAINNRNRTFVNGTQRYFAEVLANNIYLRAKKENLNTDKISFDYFGIPTIGNGRGIAEIRQLYEKVDSDIQAYAKGDKPQASYSHLIDAMLAFCIAADEHRNDGSIGLEIDKNYSLYPLDKNTGEVFTKDIFSQIKITDNEFSDKKLVRKKATEGFNTHRQMTRDGIYAENYLPILIHKELDEVRKGYTWKNSEEIKIFKGKKYDIQQLNNLLYCLKFVDKPISIDIQISTLEELRNILTTNNIAATAEYYYINLKTQKLHEYYIENYNTALGYKKYTKEMEFLRSLAYRSERVKIKSIDDVKQVLDKDSNFIIGKITLPFKKEWQRLYREWQNITIKDDYEFLKSFFNVKSITKLHKKVRKDFSLPISTNEGKFLVKRKTWDNNFIYQILNDSDSRVDGTKPFIPAFDISKNEIVEAIIDSFTSKNIFWLPKNIELQKVDNKNIFAIDTSKWFEVETPSDLRDIGVATIQYKIDNNSRPKVRVKLDYVIDDDSKINYFTNHSLLKSRYPDKVLEILKQSTIIEFESSGFNKTIKEMLGMTLAGIYNETSNN

SEQ ID NO: 962 - protein, 1646 aa, Francisella sp.
  cf
MNIKILPIAIDLGAKNTGVFSAFYQKGTSLESLDNKNGKVYELSKDSYTLLMNNRTARRHQRRGIDRKQLVKRLFKLIWTKQLNLEWNKDTQQTISFLLNRRGFSFITDGYSPEYLNIAPEAVKAILMSILDDYNGEDDLDSYLQSATENDSKIDELYNKLLQKALEFKLRKLCIDIKEDKVTTKTLKELSNTEFKLLANYLVDYDRILRTQKFSYTDKQGNLRELNYYHHDKYNIQEFLKRNIIINDVILEKLTDDLDIWNLNFDKFDFEKNLEKLENQEDKDYLQTHLHHFVFAVNKIKSEMASGGRHRSQYFQEITNVLVENNHQEGYLKNFCENLHNKKYSNLSVKNLVNLIGNLSNLELKPLRKYFNDKIHAKADYWDEQKFAETYSDWILGEWRVGAKDKDKKDGAKYSYKNLCDELKQKVGINQDGIINQTKSDFVDFLLELDPCRTIPPYLDNNNRKPPKCQSLILNPKFLDNKYPNWQQYLQELKKLQTVQNYLGNFEIDLKDLKSSKEQPYFVKYKSLNQQIASGQRDYKDLDARVLQFIFDRVKASDELLLNEIYSHAKKLKQNTSSELEKLELCKKLDEVIANSQLSQILKSQHVNGIFEQGTFLHLVCKYYKQRQRARDSRLYIMPEYRYDKKLDKYNNTGRFDDDNQLLTYCNHKPRQKRYQLLNDLAGVLQVSPNFLKDKIGSDDDLFISKWLVEHIRGFKKACEDSLKIQKDNRGLLNHKINIARNTKGKCEKEIFNLICKIEGSEDKKGNYKHGLAYELGVLLFGEPNQASKLEFDRKIKKFNSIYSFAQIQQIAFAERKGNANTCAVCSADNAHRMQQIKVAKPVEGNKDNIILSAKAQRLPAIPTRIVDGAVKKIATILARNIVDDNWDNIKQALSNNQQLHVPIITESNAFEFEPALADIKGKSLKDKRKKALERIDPENVFKDKNNRIKEFAKGISAYSDANLANGDFDGAKEELDHIIPRSHKKYGTLNDEANLICVTREDNQNRGNKAVFLYDLKPNYKLKQFNTTDDLEIEKKIADTIWDASKQDFKFGNYRSFINLTPQEQIAFRHALFLADKNPIKKAVIRAIDNRNRTFVNGTQRYFAEVLANNIYLRAKKENLATNRITFDYFGIETTNSNGRGIADVRKLYEKVDSDIQAYAKGDKPQDSYSHLIDAMIAFCVAADEHKNEGSIGLKMGNQYGLFPTPDKYDENTGEIISWHNDDIFRKIKVSDNQFSDKKLVRKKATEGFNTHRQMTRDGIYGESYLPILIHKNLNEVRKGYNWENSEEIKIFKGKKYDIQQLNNLVYCLKFVDKPISIDIQITTLEELRNILETNNISTTAEYYYINLKTQKLHEYYIENYNTALGYKKYTKEMEFLRSLAYRTERVKIKSIDDVSMILAKDSNFKAGKIELPFKTEWQRLYLEWQNTTIKDNHEFLKSYFSVKNATKQHKKVRKDFSLPISTNEGKLLVKRKTWDNNFIYQILNDSDSRADGTKPFIPAFDISKNEIVETIIKSFTSKNIFWLPKNIELQKVDNKSIFAIDTSRWFEVETPKDLIEIGVSTIQYKIDNNSRPKVRVKLDYVMDDDSKINYFMNHSLLKSRYPDKVLEILKQSTIIEFESSGFNKTIKEMLGMTLAGIYNETSNN

SEQ ID NO: 963 - protein, 1629 aa, Francisella novicida
MNFKILPIAIDLGVKNTGVFSAFYQKGTSLERLDNKNGKVYELSKDSYTLLMNNRTARRHQRRGIDRKQLVKKLFKLIWTEQLNLEWDKDTQQAISFLFNRRGFSFITDGYSPEYLNIVPEQVKAILMDIFDDYNGEDDLDSYLKLATEQESKISEIYNKLMQKILEFKLRKLCTDIKDDKVSTKTLKEITSYEFELLADYLANYSESLKTQKFSYTDKQGNLKELSYYHHDKYNIQEFLKRHATINDEILDTLLTDDLDIWNFNFEKFDFDKNEEKLQNQEDKDHTQAHLHHFVFAVNKIKSEMASGGRHRGQYFQEITNVLDENNHQEGYLKNFCENLHNKKYSNLSVKNLVNLIGNLSNLELKPLRKYFNDKIHAKADHWDEQKFTETYCHWILGEWRVGLKDQDKKEGAKYSYKDLCNELKQKVTNAGLIDFLLELDPCRTIPPYLDNNNRKPPKCQSLILNPKFLDNQYPNWQQYLQELKKLQIIQDYLESFETDLKVLKSSKDQPYFVEYKSSNQQIASGQRDYKDLDARILQFIFDRVKASDELLLNEIYFQAKKLKQKASSELEKLESSKKLDEVIANSQLSKILKSQHTNGIFEQGTFLHLVCKYYKQRQRARDSRLYIMPEYRYDKKLDKYNNTGRFDDDNQLLTYCNHKPRQKRYQLLNDLAGVLQVSPNFLKDKIGSDDDLFISKWLVEHIRGFKKACEDSLKIQKDNRGLLNHKINIARNTKGKCEKEIFNLICKIEGSEDKKGNYKHGLAYELGVLLFGEPNEASKPEFDRKIKKFNSIYSFAQIQQIAFAERKGNANTCAVCSADNAHRMQQIKITEPVEDNKDKIILSAKAQRLPAIPTRIVDGAVKKMATILAKNIVDDNWQNIKQVLSAKHQLHIPIITESNAFEFEPALADVKGKSLKDRRKKALERISPENIFKDKNNRIKEFAKGISAYSGANLTDGDFDGAKEELDHIIPRSHKKYGTLNDEANLICVTRDDNKNKGNRIFCLHDLANNYKLKQFETTDDLEIEKKIADTIWDASKKDFKFGNYRSFINLTPQEQKAFRHALFLADENPIKQAVIRAINNRNRTFVNGTQRYFAEVLANNIYLRAKKENLNTDKISFDYFGIPTIGNGRGIAEIRQLYEKVDSDIQVYAKGDKPQASYSHLIDAMLAFCIAADEHRNDGSIGLEIDKNYSLYPLDKNTGEVFTKDIFSQIKITDNEFSDKKLVRKKATEGFNTHRQMTRDGIYAENYLPILIHKELDEVRKGYTWKNSEEIKIFKGKKYDIQQLNNLLYCLKFVDKPISIDIQISTLEELRNILTTNNIAATAEYYYINLKTQKLHEYYIENYNTALGYKKYTKEMEFLRSLAYRSERVKIKSIDDVKQVLDKDSNFIIGKITLPFKKEWQRLYREWQNTTIKDDYEFLKSFFNVKSITKLHKKVRKDFSLPISTNEGKFLVKRKTWDNNFIYQILNDSDSRVDGTKPFIPAFDISKNEIVEAIIDSFTSKNIFWLPKNIELQKVDNKNIFAIDTSKWFEVETPSDLRDIGVATIQYKIDNNSRPKVRVKLDYVIDDDSKINYFTNHSLLKSRYPDKVLEILKQSTIIEFESSGFNKTIKEMLGMTLAGIYNETSNN

SEQ ID NO: 964 - protein, 1629 aa, Francisella novicida
MNFKILPIAIDLGVKNTGVFSAFYQKGTSLERLDNKNGKVYELSKDSYTLLMNNRTARRHQRRGIDRKQLVKRLFKLIWTEQLNLEWDKDTQQAISFLFNRRGFSFITDGYSPEYLNIVPEQVKAILMDIFDDYNGEDDLDSYLKLATEQESKISEIYNKLMQKILEFKLMKLCTDIKDDKVSTKTLKEITSYEFELLADYLANYSESLKTQKFSYTDKQGNLKELSYYHHDKYNIQEFLKRHATINDRILDTLLTDDLDIWNFNFEKFDFDKNEEKLQNQEDKDHIQAHLHHFVFAVNKIKSEMASGGRHRSQYFQEITNVLDENNHQEGYLKNFCENLHNKKYSNLSVKNLVNLIGNLSNLELKPLRKYFNDKIHAKADHWDEQKFTETYCHWILGEWRVGVKDQDKKDGAKYSYKDLCNELKQKVTKAGLVDFLLELDPCRTIPPYLDNNNRKPPKCQSLILNPKFLDNQYPNWQQYLQELKKLQSIQNYLDSFETDLKVLKSSKDQPYFVEYKSSNQQIASGQRDYKDLDARILQFIFDRVKASDELLLNEIYFQAKKLKQKASSELEKLESSKKLDEVIANSQLSQILKSQHTNGIFEQGTFLHLVCKYYKQRQRARDSRLYIMPEYRYDKKLHKYNNTGRFDDDNQLLTYCNHKPRQKRYQLLNDLAGVLQVSPNFLKDKIGSDDDLFISKWLVEHIRGFKKACEDSLKIQKDNRGLLNHKINIARNTKGKCEKEIFNLICKIEGSEDKKGNYKHGLAYELGVLLFGEPNEASKPEFDRKIKKFNSIYSFAQIQQIAFAERKGNANTCAVCSADNAHRMQQIKITEPVEDNKDKIILSAKAQRLPAIPTRIVDGAVKKMATILAKNIVDDNWQNIKQVLSAKHQLHIPIITESNAFEFEPALADVKGKSLKDRRKKALERISPENIFKDKNNRIKEFAKGISAYSGANLTDGDFDGAKEELDHIIPRSHKKYGTLNDEANLICVTRGDNKNKGNRIFCLRDLADNYKLKQFETTDDLEIEKKIADTIWDANKKDFKFGNYRSFINLTPQEQKAFRHALFLADENPIKQAVIRAINNRNRTFVNGTQRYFAEVLANNIYLRAKKENLNTDKISFDYFGIPTIGNGRGIAEIRQLYEKVDSDIQAYAKGDKPQASYSHLIDAMLAFCIAADEHRNDGSIGLEIDKNYSLYPLDKNTGEVFTKDIFSQIKITDNEFSDKKLVRKKAIEGFNTHRQMTRDGIYAENYLPILIHKELNEVRKGYTWKNSEEIKIFKGKKYDIQQLNNLVYCLKFVDKPISIDIQISTLEELRNILTTNNIAATAEYYYINLKTQKLHEYYIENYNTALGYKKYSKEMEFLRSLAYRSERVKIKSIDDVKQVLDKDSNFIIGKITLPFKKEWQRLYREWQNTTIKDDYEFLKSFFNVKSITKLHKKVRKDFSLPISTNEGKFLVKRKTWDNNFIYQILNDSDSRVDGTKPFIPAFDISKNEIVEAIIDSFTSKNIFWLPKNIELQKVDNKNIFAIDTSKWFEVETPSDLRDIGVATIQYKIDNNSRPKVRVKLDYVIDDDSKINYFTNHSLLKSRYPDKVLEILKQSTTIEFESSGFNKTIKEMLGMTLAGIYNETSNN

SEQ ID NO: 965 - protein, 244 aa, Francisella tularensis
ARKQNSEIYNKLMQKILEFKLRKLCTDIKDDKVSTKTLKEITSYEFELLADYLANYSESLKTQKFSYTDKQGNLKELSYYHHDKYNIQEFLKRHATINDEILDTLLTDDFDIWNFNFEKFDFDKNEEKLQNQEDKDHTQAYLHHFVFAVNKIKSEMASGGRHRSQYFQEITNVLDENNHQEGYLKNFCENLHNKKYSNLSVKNLVNLVGNLSNLELKPLRKYFNDKNLIIGMSKSLQKLIATGY

SEQ ID NO: 966 - protein, 501 aa, Francisella tularensis
MEIEKKIADTIWDASKQDFKFGNYRSFINLTPQEQKAFRYALFLADENSIKQAVIRAINNRNRTFVNGTQRYFAEVLANNIYLRAKKENLNTDKISFDYFGIPTIGNGRGIADIRQLYEKVDSDIQAYAKGDKPQASYSHLIDAMIAFCVAADEHRNDGSIGLEIDKNYSLYLLDKNTGEVFTKDIFSQIKITDNEFSDKKLVRKKATEGFNTHRQMTRDGIYAENYLPILIHKELDEVRKGYTWGNSEELKIHKGKKYNIQQLNNIVYCLKFIDKSISIDIQISTLEELRNILTTNNIAATAEYYYINLKNQKLHEYYIENYNTALDYKKYSKEMEFLRSLAYRSERVKIKSIDDVKQVLDKDSNFIIGKITLPFKKEWQRLYLEWQNTTIKDDYEFLKSFFNVKSITKLHKKVRKDFSLPISTNEGKFLVKRKTWDNNFIYQILNDSDSRVDGTKPFIPAFDISKNEIVEAIIDSFTSKNIFWLPKNIELQNVDKIFLL

SEQ ID NO: 967 - protein, 158 aa, Francisella tularensis
MIDFLLELDPCITIPPYLDNNNRKPPKCQSLILNPKFLDNQYPNWQQYLQELKKLQSIQDYLDSFETDLKDLKSSKDQPYFVEYKSSNQQMASGQRDYKDLDARILQFIFDRVKASDELLLNEIYFQAKKLKQKASSELEKLESSKKLDEVIANSQLS

SEQ ID NO: 968 - protein, 878 aa, Francisella tularensis
MLNDLAGVLQVSRNQLLSSVEEWFQQAQRVGEISKSQDEQIFEWLKSFKIASYCKAAVEMQKQYRGTLKNAIQTAIFRQSENINKNKNKNKNTGNQQQALSENSKDVKSLTADEKKLLKLIENIAKASQKIGESLGLNDKQIKKFNSIYNFAQIQQIAFAERKGNANTCAVYSADNAHRMQQIKITELVEDNKDNIILSAKAQRLPAIPTRIVDGAVKKMATILAKNIVDDNWQNIKQVLSAKHQLHIPIITESNAFEFEPALADVKGKSLKDRRKKALERISPENIFKDKNNRIKEFAKGISAYSGANLTDGDFDGAKEELDHIIPRSYKKYGTLNDEVNLICVTRDDNKNKGKRIFCLNDLANNYKLKQFETTDDLEIEKKIADTIWDASKQDFKFGNYRSFINLIPQEQKAFRYALFLADENSIKQAVIRAINNRNRTFVNGTQRYFAEVLANNIYLRAKKENLNTDKISFDYFGIPTIGNGRGIADIRQLYEKVDSDIQAYAKGDKPQASYSHLIDAMIAFCVAADEHRNDGSIGLEIDKNYSLYPLDKNTGEVFTKDIFSQIKITDNEFSDKKLVRKKATEGFNTHRQMTRDGIYAENYLPILIHKELDEVRKGYTWGNSEELKIHKGKKYNIQQLNNIVYCLKFIDKSISIDIQISTLEELRNILTTNNIAATAEYYYINLKNQKLHEYYIENYNTALDYKKYSKEMEFLRSLAYRSERVKIKSIDDVKQVLDKDSNFIIGKITLPFKKEWQRLYLEWQNTTIKDDYEFLKSFFNVKSINKLHKKVRKDFSLPISTNEGKFLVKRKTWDNNFIYQILNDSDSRVDGTKPFIPAFDISKNEIVEAIIDSFTSKNIFWLPKNIELQKVDKIFLL

SEQ ID NO: 969 - protein, 292 aa, Francisella tularensis
MLNDLAGVLQVSRNQLLSSVEEWFQQAQRVGEISKSQDEQIFEWLKSFKIASYCKAAVEMQKQYRGTLKNAIQTAIFRQSENINKNKNKNTGNQQQALSENSKDVKSLTADEKKLLKLIENIAKASQKIGESLGLNDKQIKKFNSIYNFAQIQQIAFAERKGNANTCAVYSADNAHRMQQIKITELVEDNKDNIILSAKAQRLPAIPTRIVDGAVKKMVTILAKNIVDDNWQNIKQVLSAKHQLHIPIITESNAFEFEPALADVKGKSLKDRRKKALERISPENIFKDKNIC

SEQ ID NO: 970 - protein, 53 aa, Francisella tularensis
MNHSLLKSRYPDKVLEILKQSTIIEFESSGFNKTIKEMLGMTLAGIYNETSNN

SEQ ID NO: 971 - protein, 393 aa, Francisella tularensis
MNVKILPIAIDLDVKNTGVFSAFYQKGTSLEKLDNKNGKVYELSKDSYTLLMNNRTAQRHQRRGIDRKQLVKRLFKLVWTEQLNLEWDKDTQQAISFLFNRRGFSFITDGYSTEYLNIVPEQVKAILMDIFDDYNGEDDLDSYLKLATEQESKISEIYNKLMQKILEFKLRKLCTDIKDDKVSTKTLKEITSYEFELLADYLANYSESLKTQKFSYTDKQGNLKELSYYHHDKYNIQEFLKRHATINDEILDTLLTDDFDIWNFNFEKFDFDKNEEKLQNQEDKDHTQAYLHHFVFAVNKIKSEMASGGRHRSQYFQEITNVLDENNHQEGYLKNFCENLHNKKYSNLSVKNLVNLVGNLSNLELKPLRKYFNDKNLIIGMSKSLQKLIATGY

SEQ ID NO: 972 - protein, 1629 aa, Francisella tularensis
MNVKILPIAIDLGVKNTGVFSAFYQKGTSLERLDNKNGKVYELSKDSYTLLMNNRTARRHQRRGIDRKQLVKRLFKLIWTEQLNLEWDKDTQQAISFLFNRRGFSFITDGYSPEYLNIVPEQVKAILMDIFDDYNGEDDLDSYLKLATEQESKISEIYNKLMQKILEFKLRKLCTDIKDDKVSTKTLKEITSYEFELLADYLANYSEILKTQKFSYTDKQGNLKELSYYHHDKYNIQEFLKRHATINDEILDTLLTDDLDIWNFNFEKFDFDKNEEKLQNQEDKDHTQAHLHHFVFAVNKIKSEMASGGRHRGQYFQEITNVLDENNHQEGYLKNFCENLHNKKYSNLSVKNLVNLIGNLSNLELKPLRKYFNDKIHAKADHWDEQKFTETYCHWILGEWRVGVKDQDKKDGAKYSYKDLCNELKQKVTKAGLVDFLLELDPCRTIPPYLDNNNRKPPKCQSLILNPKFLDNQYPNWQQYLQELKKLQSIQNYLESFETDLKVLKSSKDQPYFVEYKSSNQQIASGQRDYKDLDARILQFIFDRVKASDELLLNEIYFQAKKLKQKASSELEKLESSKKLDEVIANSQLSQILKSQHTNGIFEQGTFLHLVCKYYKQRQRARDSRLYIMPEYRYDKKLDKYNNTGRFDDDNQLLTYCNHKPRQKRYQLLNDLAGVLQVSPNFLKDKIGSDDDLFISKWLVEHIRGFKKACEDSLKIQKDNRGLLNHKINIARNTKGKCEKEIFNLICKIEGSEDKKGNYKHGLAYELGVLLFGEPNEASKPEFDRKIKKFNSIYSFAQIQQIAFAERKGNANTCAVCSADNAHRMQQIKITEPVEDNKDKIILSAKAQRLPAIPTRIVDGAVKKMATILAKNIVDDNWQNIKQVLSAKHQLHIPIITESNAFEFEPALADVKGKSIKDRRKKALERISPENIFKDKNNRIKEFAKGISAYSGDNLASGDFDGAKEELDHIIPRSHKKYGTLNDEANLICVTRDDNKNKGNRIFCLHDLANNYKLKQFETTDDLEIEKKIADTIWDASKKDFKFGNYRSFINLTPQEQKAFRHALFLADENPIKQAVIRAINNRNRTFVNGTQRYFAEVLANNIYLRAKKENLNTDKISFDYFGIPTIGNGRGIVEIRQLYEKVDSDIQAYAKGDKPQASYSHLIDAMLAFCIAADEHRNDGSIGLEIDKNYSLYPLDKNTGEVFTKDIFSQIKITNNEFSDKKLVRKKATEGFNTHRQMTRDGIYAENYLPILIHKELDEVRKGYTWGNSEELKIHKGKKYDIQQLNNLVYCLKFIDKSISIDIQISTLEELRNILTTNNIATTAEYYYINLKTQKLHEYYIENYNTALGYKKYTKEMEFLRSLAYRSERVKIKSIDDVKQVLDKDSNFIIGKITLPFKKEWQRLYREWQNTTIKDDYEFLKSFFNVKSITKLHKKVRKDFSLPISTNEGKFLVKRKTWDNNFIYQILNDSDSRVDGTKPFIPAFDISKNEIVEAIIDSFTSKNIFWLPKNIELQKVDNKNIFAIDTSKWFEVETPSDLRDIGVATIQYKIDNNSRPKVRVKLDYVIDDDSKINYFTNHSLLKSRYPDKVLEILKQSTIIEFESSGFNKTIKEMLGMTLAGIYNETSNN

SEQ ID NO: 973 - protein, 285 aa, Francisella tularensis
MTRDGIYAENYLPILIHKELDEVRKGYTWGNSEELKIHKGKKYNIQQLNNIVYCLKFIDKSISIDIQISTLEELRNILTTNNIAATAEYYYINLKNQKLHEYYIENYNTALDYKKYSKEMEFLRSLAYRSERVKIKSIDDVKQVLDKDSNFIIGKITLPFKKEWQRLYLEWQNTTIKDDYEFLKSFFNVKSITKLHKKVRKDFSLPISTNEGKFLVKRKTWDNNFIYQILNDSDSRVDGTKPFIPAFDISKNEIVEAIIDSFTSKNIFWLPKNIELQKVDKIFLL

SEQ ID NO: 974 - protein, 1323 aa, Fructobacillus fructosus
MVYDVGLDIGTGSVGWVALDENGKLARAKGKNLVGVRLFDTAQTAADRRGFRTTRRRLSRRKWRLRLLDELFSAEINEIDSSFFQRLKYSYVHPKDEENKAHYYGGYLFPTEEETKKFHRSYPTIYHLRQELMAQPNKRFDIREIYLAIHHLVKYRGHFLSSQEKITIGSTYNPEDLANAIEVYADEKGLSWELNNPEQLTEIISGEAGYGLNKSMKADEALKLFEFDNNQDKVAIKTLLAGLTGNQIDFAKLFGKDISDKDEAKLWKLKLDDEALEEKSQTILSQLTDEEIELFHAVVQAYDGFVLIGLLNGADSVSAAMVQLYDQHREDRKLLKSLAQKAGLKHKRFSEIYEQLALATDEATIKNGISTARELVEESNLSKEVKEDTLRRLDENEFLPKQRTKANSVIPHQLHLAELQKILQNQGQYYPFLLDTFEKEDGQDNKIEELLRFRIPYYVGPLVTKKDVEHAGGDADNHWVERNEGFEKSRVTPWNFDKVFNRDKAARDFIERLTGNDTYLIGEKTLPQNSLRYQLFTVLNELNNVRVNGKKFDSKTKADLINDLFKARKTVSLSALKDYLKAQGKGDVTITGLADESKFNSSLSSYNDLKKTFDAEYLENEDNQETLEKIIEIQTVFEDSKIASRELSKLPLDDDQVKKLSQTHYTGWGRLSEKLLDSKIIDERGQKVSILDKLKSTSQNFMSIINNDKYGVQAWITEQNTGSSKLTFDEKVNELTTSPANKRGIKQSFAVLNDIKKAMKEEPRRVYLEFAREDQTSVRSVPRYNQLKEKYQSKSLSEEAKVLKKTLDGNKNKMSDDRYFLYFQQQGKDMYTGRPINFERLSQDYDIDHIIPQAFTKDDSLDNRVLVSRPENARKSDSFAYTDEVQKQDGSLWTSLLKSGFINRKKYERLTKAGKYLDGQKTGFIARQLVETRQIIKNVASLIEGEYENSKAVAIRSEITADMRLLVGIKKHREINSFHHAFDALLITAAGQYMQNRYPDRDSTNVYNEFDRYTNDYLKNLRQLSSRDEVRRLKSFGFVVGTMRKGNEDWSEENTSYLRKVMMFKNILTTKKTEKDRGPLNKETIFSPKSGKKLIPLNSKRSDTALYGGYSNVYSAYMTLVRANGKNLLIKIPISIANQIEVGNLKINDYIVNNPAIKKFEKILISKLPLGQLVNEDGNLIYLASNEYRHNAKQLWLSTTDADKIASISENSSDEELLEAYDILTSENVKNRFPFFKKDIDKLSQVRDEFLDSDKRIAVIQTILRGLQIDAAYQAPVKIISKKVSDWHKLQQSGGIKLSDNSEMIYQSATGIFETRVKISDLL

SEQ ID NO: 975 - protein, 1367 aa, Fusobacterium sp.
MKKQKFSDYYLGFDIGTNSVGWCVTDLDYNVLRFNKKDMWGSRLFDEAKTAAERRVQRNSRRRLKRRKWRLNLLEEIFSDEIMKIDSNFFRRLKESSLWLEDKNSKEKFTLFNDDNYKDYDFYKQYPTIFHLRDELIKNPEKKDIRLIYLALHSIFKSRGHFLFEGQNLKEIKNFETLYNNLISFLEDNGINKSIDKDNIKKLEKIICDSGKGLKDKEKEFKEIFNSDKQLVAIFKLSVGSSVSLNDLFDTDEYKKEEVEKEKISFREQIYEDDKPIYYSILGEKIELLDIAKSFYDFMVLNNILSDSNYISEAKVKLYEEHKKDLKNLKYIIRKYNKENYDKLFKDKNENNYPAYIGLNKEKGKKEVVEKSGLKIDDLIKVIKGYLPKPERIEEKDKTIFNEILNKIELKTILPKQRISDNGTLPYQIHEVELEKILENQSKYYDFLNYEENGVSTKDKLLKTFKFRIPYYVGPLNSYHKDKGGNSWIVRKEEGKILPWNFEQKVDIEKSAEEFIKRMTNKCTYLNGEDVIPKDSFLYSEYIILNELNKVQVNDEFLNEENKRKIIDELFKENKKVSEKKFKEYLLVNQIANRTVELKGIKDSFNSNYVSYIKFKDIFGEKLNLDIYKEISEKSILWKCLYGDDKKIFEKKIKNEYGDILNKDEIKKINSFKFNTWGRLSEKLLTGIEFINLETGECYSSVMEALRRTNYNLMELLSSKFTLQESIDNGNKEMNEVSYRDLIEESYVSPSLKRAILQTLKIYEEIKKITGRVPKKVFIEMARGGDETMKNKKIPARQEQLKKLYDSCGNDIANFSIDIKKMKSSLSSYDNNSLRQKKLYLYYLQFGKCMYTGREIDLDRLLQNNDTYDIDHIYPRSKVIKDDSFDNLVLVLKNENAEKSNEYPVKKEIQEKMKSFWRFLKEKNFISDEKYKRLTGKDDFELRGFMARQLVNVRQTTKEVGKILQQIEPEIKIVYSKAEIASSFREMFDFIKVRELNDTHHAKDAYLNIVAGNVYNTKFTEKPYRYLQEIKENYDVKKIYNYDIKNAWDKENSLEIVKKNMKKNTVNITRFIKEEKGQLFDLNPIKKGETSNEIISIKPKLYNGKEEKLNEKYGYYKSLNPAYFLYVEHKEKNKRIKSFERVNLVDVNNIKDEKSLVKYLIENKKLVEPRLIKKVYKRQVILINDYPYSIVALDSNKLMDFENLKPLFLENKYEKILKNVIKFLEDNQGKSEENYKFIYLKKKDRYEKNETLESVKDRYNLEFNEMYDKFLEKLDSKDYKNYINNKKYKNLLDVKEKFIKLNLFDKAFTLKSFLDLFNRKTMADFSKVGLTKYLGKIQKISSNVLSKNELYLLEESVTGLFVKKIKL

SEQ ID NO: 976 - protein, 1367 aa, Fusobacterium sp.
MKKQKFSDYYLGFDIGTNSVGWCVTDLDYNVLRFNKKDMWGSRLFDEAKTAAERRVQRNSRRRLKRRKWRLNLLEEIFSDEIMKIDSNFFRRLKESSLWLEDKNSKEKFTLFNDDNYKDYDFYKQYPTIFHLRDELIKNPEKKDIRLIYLALHSIFKSRGHFLFEGQNLKEIKNFETLYNNLISFLEDNGINKSIDKDNIKKLEKIICDSGKGLKDKEKEFKEIFNSDKQLVAIFKLSVGSSVSLNDLFDTDEYKKEEVEKEKISFREQIYEDDKPIYYSILGEKIELLDIAKSFYDFMVLNNILSDSNYISEAKVKLYEEHKKDLKNLKYIIRKYNKENYDKLFKDKNENNYPAYIGLNKEKGKKEVVEKSGLKIDDLIKVIKGYLPKPERIEEKDKIIFNEILNKIELKTILPKQRISDNGTLPYQIHEVELEKILENQSKYYDFLNYEENGVSTKDKLLKTFKFRIPYYVGPLNSYHKDKGGNSWIVRKEEGKILPWNFEQKVDIEKSAEEFIKRMTNKCTYLNGEDVIPKDSFLYSEYIILNELNKVQVNDEFLNEENKRKIIDELFKENKKVSEKKFKEYLLVNQIANRTVELKGIKDSFNSNYVSYIKFKDIFGEKLNLDIYKEISEKSILWKCLYGDDKKIFEKKIKNEYGDILNKDEIKKINSFKFNTWGRLSEKLLTGIEFINLETGECYSSVMEALRRTNYNLMELLSSKFTLQESIDNGNKEMNEVSYRDLIEESYVSPSLKRAILQTLKIYEEIKKITGRVPKKVFIEMARGGDETMKNKKIPARQEQLKKLYDSCGNDIANFSIDIKKMKSSLSSYDNNSLRQKKLYLYYLQFGKCMYTGREIDLDRLLQNNDTYDIDHIYPRSKVIKDDSFDNLVLVLKNENAEKSNEYPVKKEIQEKMKSFWRFLKEKNFISDEKYKRLTGKDDFELRGFMARQLVNVRQTTKEVGKILQQIEPEIKIVYSKAEIASSFREMFDFIKVRELNDTHHAKDAYLNIVAGNVYNTKFTEKPYRYLQEIKENYDVKKIYNYDIKNAWDKENSLEIVKKNMKKNTVNITRFIKEEKGQLFDLNPIKKGETSNEIISIKPKLYNGKEEKLNEKYGYYKSLNPAYFLYVEHKEKNKRIKSFERVNLVDVNNIKDEKSLVKYLIENKKLVEPRLIKKVYKRQVILINDYPYSIVALDSNKLMDFENLKPLFLENKYEKILKNVIKFLEDNQGKSEENYKFIYLKKKDRYEKNETLESVKDRYNLEFNEMYDKFLEKLDSKDYKNYINNKKYKNLLDVKEKFIKLNLFDKAFTLKSFLDLFNRKTMADFSKVGLTKYLGKIQKISSNVLSKNELYLLEESVTGLFVKKIKL

SEQ ID NO: 977 - protein, 1367 aa, Fusobacterium sp.
MKKQQFSDYYLGFDIGTNSVGWCVTDFNYNVLRFNKKDMWGSRLFDEAKTAAERRVQRNSRRRLKRRKWRLNLLEEIFSDEILKIDSNFFRRLKESSLWLEDKSSKEKFTLFNDDNYKDYDFYKQYPTIFHLRNELIKNPEKKDIRLVYLALHSIFKSRGHFLFEGQNLKDIKNFETLYNNLMAFLEDNDIYKNIDSSYIGNLENIICDSKKGLKDKEKEFKEIFNSDKQLVGFFKLSVGSSVSLNDLFDTDEYKKGEVEKEKISFREQIYEDDKPIYYSILGEKIEFLDIAKSFYDFMVLNNILADSQYISEAKVKLYDEHKRDLKNLKYIIRKYNKENYDKLFKDKNESNYSAYIGLNKEKGKKEVIEKSRLKIDDFAKIIKGYLPKAEKIDEKDRSIFNEILDKIELKTILPKQRISDNGTLPYQIHEAELEKILENQAKYYDFLNHEENGISTKDKLLMTFKFRIPYYVGPLNSYHKNKGGNSWIVRKEEGKILPWNFEQKVDIEKSAEEFIKRMTNKCTYLNGEDVIPKDSFLYSEYIILNELNKVQVNDEFLNKEIKKKIIEDLFKKSKKISEKNFREYLLVNQITNKTVELKGVKDAFNSNYVSYIKFKDIFGDKLNLDIYKEISEKSILWKCLYGDDKKIFEKKIKSVYGDILTKDEIKKINSFKFNTWGRLSEKLLTEIEFIDLETGECYSSVMDALRRTNYNLMELLSSKFTLQENIDNENKEVSEFSYRDLVEESYVSPSLKRAILQTLKIYEEIRKITGRIPKKVFIEMARGGDETMKNKKIPARQEQLKKLYDSCGKDISNFSIDIKEMKNSLNSYDNNSLRQKKLYLYYLQFGKCMYTGKEIDLNRLLQNNDTYDIDHIYPRSKVIKDDSFDNLVLVLKNENAEKSNEYPLKKEIQEKMKSFWKFLKEKNFISDEKYKRLTGKDEFELRGFMARQLVNVRQTTKEAGKILQQIEPEIKIVYSKAEIASSFREMFDFIKVRELNDTHHAKDAYLNIVAGNVYNTKFTEKPYRYLQEIKENYDVKKIYNYDIKNAWDKEKSLEIVKKNMEKNTVNITRFIKEEKGQLFDLNPIRKGETSNEIIAIKPKFYEGSTEKLNEKYGYYKSLNPAYFIYVEHKEKNKIIRSFERVNLVDVNKIKDEKSLIKYLIENKGLIEPKVIKKVYKRQVILINNFPYSIVALDSNKLMDFENLKPLFLERKYEKILKNAIKFLEDNQGKTEEYYKFLYLKKKDRNEKNETIDSVKERYNIEFNEMYDKFLEKLDSKDYKNYINNKKYSELVNVKEKFIKLNLFDKAFTLKSFLDLFNRKTMADFSKVGLTKYLGKIQKISSNVLSKNELHLLEESVTGLFVKKIKL

SEQ ID NO: 978 - protein, 1391 aa, Galbibacter sp.
MKTILGLDLGTNSIGWALVKEAENENEVSDIIKLGVRVNPLTVDELTNFEGGKAYSNNAERTLKRGARRNLQRYKLRRENLIEILLKNGLINKDTALTEVGKETTHQTLKLRSKSANEKVSLEDLAKILLSINKKRGYKSSRKVNAEDDGVAIDGMEVAKLLYDENMTPGEYVLRLLESGKKHLPDFYRSDLQEEFNLVWKKQSEFYPLILTKELFFELHGKNKSQTWAICKEPLGIVGVKLKGSAKEQKFARYRLRKEALTQQIELEHLAIVLQDINNDSNKSSGYLGAISDRSKELFFNKETVGQYQYKQLQKDPNTSLKNQVFYRQDYLDEFEVIWRNQAKFYPQLTNELKQEIRDVVIFYQRKLKSQKNLISFCQFESTQQNYVEKETGKTKIRTIGRRVIPRSSPLFQEFKIWQSLNNLKFVNSESNQIIQFIELEDDVKKVVFDELNLRGDLKPNQVLKILSKYMKIGKLTQWKCNLEEIEGNRTNSALYNVFQMIAEEEGYGFNWGKKSALEIKSELKAIFSSIGINDSILDFDFSKKLDQQLSYQLWHLLYSAEEGNSKITEEDKFTYGNTGVALKKKLHLKFGFKPEYSTLISNLRFTSDYGNLSSKAISKILPFLRDGSDYSKACQYAGYNHSNSLSADELDNRELKPKLELLKKNSLRNPVVEKILNQMVNVVNQVIDNYGKPDEVRIELARELKKSAKERSQMTKNISDATRRNAEIKKYLSKEFGIPNPTKGDVIRYRLWEELASNGYKDLFRDKYIPKEKLFSNEIDIEHIIPKALLFDDSFSNKTLAFKVDNLKKADRTAFDFMSTDFSKDVDSYIGRIETLHKDGKISSSKYKKLMIPKSKLVDGFIERDLRNTQYIAKQARKMLLEVFKTVVPTTGKITDKLREDWDLINVMKELNFPKYKALGLTKKIERFDVGSEKIKSINVIEGWSKRNDHRHHAMDALAVAFTTHNHIQYLNYLNARKDIHHEMHGTIKSIENQIIGKDVMGKRRFIPPISDLRMKAKLQIESILISFKNKNKVVTWSVNKTKLKGKDNYNKRRQLTPRGQLHKETVYGKIKLIDPKPLKLNNKFTLVRASMIVDKVHREIVLQHLSKYDNNSEVAFDSKTIKIDPILIEGIGLKEVVCYEDVFKIRKKISGDNFKNEKHLEKVIDEKVKQILKDRVIKFQGNFKEAFSNLEENPIWLNKSKGIAVKSVAIKGVNNAESLHEGKDHFGDQILDKNKKQIPVDFVSTGNNHHVGIYEDKDGNLQERVVSFFEAVTRVNEGLPIIDKTYNSDIGWKFKFTMKQNEMFVFPSDDFDPNEFDLTDGKNAAKISPNLYRVQKIATKNYMFRHHLETVVTNDLEFTYKSIRSTGWLRNLVKVRINHLGEIVYVGEY

SEQ ID NO: 979 - protein, 1186 aa, Gardnerella vaginalis
MEGNISYAIGIDVGLNSVGLAAIRLDDYGEPIRILKAMSVIHDAGIDPNGAKESDTRKAISGVARRVRRLYRQRRRRLQKLDFLLQSLGWPVVENKDLDFSDSFIPWIFRAKLADEYIADEEQRKQMLSVAIRHIARHRGWRNPYQSIKSMMQETEYSEFYNELLKNIEKLAPGVGCEGSTPAQLVRDYLLSQQGKASRRLRITTGGRRKNHPHSLDPVLPRKLMQSDNMLEILNIFNVQHIDDKYVREQIINAVFYAESPRGSAENRVGKDAITGKGKRALKASLAFQKYRIISTISNLRIRENSKERCLTIEEKQNVYKLLTTSIDKSSKRKSAEAPLYTWIDVADCLGIERYKLRGVGSQIGDGESVGNRPPMLNSELAILYANNKSLGQSLITWWLASNRTQEDKEALIEILSNTVDIEAIHDNPEYQDKYGSAIAFIDSMNETEIAALENISLPDGRAAYSLETLDELNKQMLETDDDLFEARKKLFNLPNNWRPAEAPIAEPTGNPSVDRVLKIVHRFLISAKNRWGNPERINIEHVRSGFQSKKMANSYKELLDKRTEGKENLKAMMRNSLHLGTSDSISDADIRRYEAVQRQNGQCLYCGSEITYHTCELDHIVPRKGPGSTNTRENLVATCSSCNAQKCNTPFATWCEQSTYCKNHDISADSAINRVRAFIFPPNSYDKRGANQFKKEVIARLKQKVGDEAFDNRSIESVAWMANELHRRIDWYYNSQNYQTNNGISDISNKAQTNVGVYAGSLTAIARRMSGIDGKLEFFDGRRKTRFDRRHHAVDASVIAMMTPGIAQILAIKCNLRETQLLQGNKVVPGGIDWKEYPTANDQGYQQYANWSVRMNALLKLLNEEMRADRIAVVNSIRLRYSNSSVHQYEVNALLKLHVGDEIDSETIRRSSTPALYCALTRNPDYDVNNGFPENPGRTILLHNKKLNADDSITFFKAQAVQLFVREGSAKIGNSIHHLRIYEYFEKLKSGKIKKSYGMIRVFQNDLHRHIHEDLFSCDLPEQSISMRYADTKVAHAVQTGNANYLGYLVPGDEIIVDFSHITLSENIGKFVEFLNKIGADCTAYRHWVVVGTDTEKVLILKPSMISSEGIDKLYSNCERNNFDYSSYEKSINEILAGKGWRVSVNVLAQYKAATIRRNALGEVRWASRSHLPISWSWDTGENRE

SEQ ID NO: 980 - protein, 1186 aa, Gardnerella vaginalis
MEGNISYAIGIDVGLNSVGLAAIRLDNNGEPIRILKAMSVIHDAGIDPNGAKESDTRKAISGVARRVRRLYRQRRRRLQKLDFLLHSLGFPVVENKDLDFSDSFIPWIFRAKLADEYIADEKQRKQMLSVAIRHIARHRGWRNPYQSIKSMTQETEYSEFYNELLKNIEKFAPGVGCEGSTPAQLVRDYLLLQQGKASRRLRITTDEKRKNHPNSLNPILPRKLMQSDNMLEILNIFNVQHIDDKYVREQIINAVFYAKSPRGSAENRVGKDAITGKGKRALKASLAFQKYRIISTISNLRIRENSKERCLTIEEKQSVYKLLTTSTDESSKEKSAEAPLYTWIDVADCLGIERYKLRGVGSQIGDGESVGNRPPMLNSELAIIYANNKSLGKSLLTWWLDANRTQEDKEALIEILSNTVDIEAIHDNPEYQDKYGSAIAFIDSMDETEIAALENISLPDGRAAYSLETLDKLNKQMLETDDDLFEARKKLFNLPNNWRPSEAPIAEPTGNPSVDRVLKIVHRFLISAKNRWGNPERINIEHVRSGFKSKKMANSYKELLDKRTKGKENLKAMMRNSLHLGMSDSISDADIRRYEAVQRQNGQCLYCGSEITYHTCELDHIVPRKGPGSTNTRENLVATCSLCNAQKCNTPFSTWCEQSTYCKNHDISVDSAINRVRAFIFPPNSYDKRGANQFKKEVIARLKQKVGDEAFDNRSIESVAWMANELHRRIDWYYNSQNYQTNNGISDITNKAQTNVGVYAGSLTAIARRMSGIDGKLEFFDGRRKTRFDRRHHAVDASVIAMMTPGIAQILAIKCNLRETQLLQGNKVVPGGIDWKEYPTANDQGYQQYANWSVRMNALLKLLNEEMRADRIAVVNSIRLRYNNSSVHQYKVNALLKLHVGDEIDSGTIRRSSTPALYCALTRNPDYDVNNGLPENPNRAILLHDKKLNADDSITFFKAQAVQLFVREGSAEIGSSTHHLRIYEYFKKLKSGKIKKSYGMIRVFQNDLHRHIHEDLFSCDLPEQSISMRYADTEVAHAVQTGNSNYLGYLVPGDEIIVDFSHVKLSGNIGTFVEFLNKIGANCAAYNHWVVVGTDTEKVLILKPSMISSEGIDKLYSNCKRNNFDYSSYEKSINEILVGKGWRVSVNVLAKYNAETIRRNALGEVRWTSRSHLPISWSWNTGENRE

SEQ ID NO: 981 - protein, 1258 aa, Gemella haemolysans
MTEENPDIRKVFLAIHHILKNRGHFLLQGQSFKEGNLNNLIKELLNLDILHISIEITEENINKITEIALEKKTLTDKVNDLKKIYPKEKQLLEAFRLIFGGKTSLDKLFAIDEYKELDASVKSVSFKEKIYEEVRHDYEQVLSNYIELLDLAKLVYDSIILSDIKKEGKTLSESKVELYHKHREDLTKLKTLVKNDSKLSEDKKVELYSAIFKEDKDKGTNYVNYIRKSEEGKGCNYEDFKKFLVKELAKLEESSAKEEILRDLELELFLPLQRTKDNSVVPYQIHKEELVKILDNAAKYHKFLNEKDDSGYSIIEKVIQLLEFRIPYYVGPLNSSKKAKVDGFAWSVRNKGYENTPVTPWNYEKVIDESASAEKFITNLTNKCTYLKGEDVLPKSSLLYSEFALLNELNALKYDGNRISLEARNVIIEKLFKEQGKKVTKTSIKNLLKAEGYIDGKGEITGIDITVKNDLKSYRDFKKILGDKFNTEHVENIILWITLYGESRKLIKAKIEAVYGDIYSKEEIAKMSRLVYKDWGRFSRKLLTELVSKKLYNEETGECLNIIGAMRQNNILFMELLADRFDYSQQIIDYNKELQKEVTEITPEILDDLYVSPSVKRSIWQTVRIVEELKKIIGCAPAKIFVETTRSNQDKKKPTDSRKKQLELFYKAVKKDVKDLEKEIGSLNFDKLNERLSSVEPSKLKAKKLYLYYTQLGRCMYSGETIDITQLNTTAYDIDHIYPQSKVKDDSFTNTVLVKREYNAAKTDRYPLGSDIQTPSNRRFWKFLKEKGLITDEKYNRLVRTEEFSDEELTGFIARQLVETSQSVKAVAGILGELNPKTSICYSKAENVSSFRQNFGKIKEGNRKSDNTEQLIKVREINDYHHAKDAYLNVVVGNVYDTKFTRNVFNFIKDKKDGRKYSLNNVFYENVSNSNNVAWELNKTVHQVEKVMNNNNILVTRRTSEQKGGLFDATVYKAKVAAKAKEGVYYPLKTSDPVVNDVTKYGGFTKVKIAYYSIFEYTLVNKKGEEKITRIIPIPIYVSQNIKDDSTLLEFGKTQINIKSGEEVKDFKLKYRKLCIGDLVKINNFFNFIGGKTNDSFVYDGAVQVTLDTESERYIKTLSKYQNWKKENKDGELWESITKEKNTELYNLLVEKMNSGIFIKKKPNKFNELNSEEIRNNFSSISLEEQAKVLLEVLNLLTNKKSIFDLKSINITAARGKISFNLSNLSQFSIIEQSVAGFYEKEITIIGDKENDMENNNC

SEQ ID NO: 982 - protein, 1054 aa, Haemophilus parainfluenzae
MENKNLNYILGLDLGIASVGWAVVEIDEKENPLRLIDVGVRTFERAEVPKTGESLALSRRLARSARRLTQRRVARLKKAKRLLKSENILLSTDERLPHQVWQLRVEGLDHKLERQEWAAVLLHLIKHRGYLSQRKNESKSENKELGALLSGVDNNHKLLQQATYRSPAELAVKKFEVEEGHIRNQQGAYTHTFSRLDLLAEMELLFSRQQHFGNPFASEKLLENLTALLMWQKPALSGEAILKMLGKCTFEDEYKAAKNTYSAERFVWITKLNNLRIQENGLERALNDNERLALMEQPYDKNRLFYSQVRSILKLSDEAIFKGLRYSGEDKKAIETKAVLMEMKAYHQIRKVLEGNNLKAEWAELKANPTLLDEIGTAFSLYKTDEDISAYLAGKLSQPVLNALLENLSFDKFIQLSLKALYKLLPLMQQGLRYDEACREIYGDHYGKKTEENHHFLPQIPADEIRNPVVLRTLTQARKVINGVVRLYGSPARIHIETGREVGKSYKDRRELEKRQEENRKQRENAIKEFKEYFPHFAGEPKAKDILKMRLYKQQNAKCLYSGKPIELHRLLEKGYVEVDHALPFSRTWDDSFNNKVLVLANENQNKGNLTPFEWLDGKHNSERWRAFKALVETSAFPYAKKQRILSQKLDEKGFIERNLNDTRYVARFLCNFIADNMHLTGEGKRKVFASNGQITALLRSRWGLAKSREDNDRHHALDAVVVACSTVAMQQKITRFVRFEAGDVFTGERIDRETGEIIPLHFPTPWQFFKQEVEIRIFSDNPKLELENRLPDRPQANHEFVQPLFVSRMPTRKMTGQGHMETVKSAKRLNEGISVIKMPLTKLKLKDLELMVNREREKDLYDTLKARLEAFNDDPAKAFAEPFIKKGGAIVKSVRVEQIQKSGVLVREGNGVADNASMVRVDVFTKGGKYFLVPIYTWQVAKGILPNKAATQYKDEEDWEVMDNSATFKFSLHPNDLVKLVTKKKTILGYFNGLNRATGNIDIKEHDLDKSKGKQGIFEGVGIKLALSFEKYQVDELGKNIRLCKPSKRQPVR

SEQ ID NO: 983 - protein, 1052 aa, Haemophilus parainfluenzae
MKNTSLNYVLGLDLGISSVGWAVVEIDEKENPLSLIDVGVRTFERAETQKGESLALARRLARSARRLTQRRVARLKKAKRLLKSENILLSTDECLPHQVWQLRVEGLERKLERQEWAAVLLHLIKHRGYLSQRKNESKSENKELGALLSGVANNHKLLQQTTYRTPAELAVKKFEVEEGHIRNQQGSYTHTFSRLDLLSEMELLFSRQQHFGNPFTSEKLLENLTALLMWQKPALSGDAILKMLGKCTFENEYKAAKHTYSAERFIWITKLNNLRIQENGLERALNDNERLALMKQPYEKAKLTYAQVRSILNLSDEAIFKGLRYSGEDKKTSETKTVLMEMKAYHQIRLALEKNDLKTEWAELKVNSSLLDEIGTAFSLYKTDEDISTCLAGKLSQPVLNALLENLNFDKFIQLSLKALHKILPLMQQGLRYDEACAEIYGDHYGKKTEENHLLLPQIPADEIRNPVVLRTLTQARKVINGVVRLYSSPARIHIETGREVGKSYQDRRELEKRQEENRKQREKAISEIKTLFPNFSGEPKAKDILKMRLYYQQNAKCLYSGKPLELHRLLEQGYVEIDHALPFSRTWDDSFNNKVLVLANENQNKGNLTPFEWLDGKNNSERWKAFKALVETSAFPYTKKQRILSQKLDEKGFIERNLNDTRYVARFLCNFIADNMHLTGEGKRKVFASNGQITALLRGRWGLAKSREDNDRHHALDAVVVACSTVSMQQKITRFVRFEEGNVFTGERIDRETGEIIPLHFPAPWKFFREEVEIRIFSDNPKLELENRLIARPQANHEFVQPLFVSRMPTRKMIGQGHMETIKSAKRLNEGLSVIKMLLTKLRLKDLESMVNREREKELYEALKARLEAFNDEPAKAFAEPFMKKGGAIVKSVRVEQVQKSGVLVRDGNGVADNASMVRVDVFTKGGKYFLVPIYTWQVAKGILPNKAVIQGKNEEDWEVMDDATFRFSLHQNDLVKLVTKKKTIFGYFNGLNRATGNIDIKEHDLEKSKVKDGIHQSIGIKLALSFEKYQVDELGKNIRLCKSSKRQAVR

SEQ ID NO: 984 - protein, 121 aa, Haemophilus pittmaniae
MLNRRYAAKITRFVRFEAGDVFTGERIDRETGEIIPLHFPTPWQFFKQEVEIRIFSDNPKLELENRLPDRPQANHEFVQPLFVSRMPTRKMTGQGHMETVKSAKRLNEGISVIKMPLTKLN

SEQ ID NO: 985 - protein, 203 aa, Haemophilus pittmaniae
MVNREREKDLYDALKARLEAFNDDPAKAFAEPFIKKGGAIVKSVRVEQVQKSGVLVREGNGVADNASMVRVDVFTKDGKYFLVPIYTWQVAKGILPNKAATQYKDEEDWEVMDNSAIFKFSLHPNDLVKLVTKKKTILGYFNGLDRATGNIAIKEHDLEKSKAKGGIHQGVGIKLALSFEKYQIDELGKNIRLCNPSKCQSVR

SEQ ID NO: 986 - protein, 1052 aa, Haemophilus sputorum
MKNTSLNYVLGLDLGISSVGWAVVEIDEKENPLSLIDVGVRTFERAETQKGESLALARRLARSARRLTQRRVARLKKAKRLLKSENILLSTDECLPHQVWQLRVEGLERKLERQEWAAVLLHLIKHRGYLSQRKNESKSENKELGALLSGVANNHKLLQQTTYRTPAELAVKKFEVEEGHIRNQQGSYTHTFSRLDLLSEMELLFSRQQHFGNPFTSEKLLENLTALLMWQKPALSGDAILKMLGKCTFENEYKAAKHTYSAERFIWITKLNNLRIQENGLERALNDNERLALMKQPYEKAKLTYAQVRSILNLSDEAIFKGLRYSGEDKKTSETKTVLMEMKAYHQIRLALEKNDLKTEWAELKVNSSLLDEIGTAFSLYKTDEDISTCLAGKLSQPVLNALLENLNFDKFIQLSLKALHKILPLMQQGLRYDEACAEIYGDHYGKKTEENHLLLPQIPADEIRNPVVLRTLTQARKVINGVVRLYSSPARIHIETGREVGKSYQDRRELEKRQEENRKQREKAISEIKTLFPNFSGEPKAKDILKMRLYYQQNAKCLYSGKPLELHRLLEQGYVEIDHALPFSRTWDDSFNNKVLVLANENQNKGNLTPFEWLDGKNNSERWKAFKALVETSAFPYTKKQRILSQKLDEKGFIERNLNDTRYVARFLCNFIADNMHLTGEGKRKVFASNGQITALLRGRWGLAKSREDNDRHHALDAVVVACSTVSMQQKITRFVRFEEGNVFTGERIDRETGEIIPLHFPAPWKFFREEVEIRIFSDNPKLELENRLIARPQANHEFVQPLFVSRMPTRKMTGQGHMETIKSAKRLNEGLSVIKMLLTKLRLKDLESMVNREREKELYEALKARLEAFNDEPAKAFAEPFMKKGGAIVKSVRVEQVQKSGVLVRDGNGVADNASMVRVDVFTKGGKYFLVPIYTWQVAKGILPNKAVIQGKNEEDWEVMDDATFRFSLHQNDLVKLVTKKKTIFGYFNGLNRATGNIDIKEHDLEKSKVKDGIHQSIGIKLALSFEKYQVDELGKNIRLCKSSKRQAVR

SEQ ID NO: 987 - protein, 1338 aa, Helcococcus kunzii
MQDYYLGLDIGTNSVGWAVTDENYNLLRKKGKDLWGVRLFKEAQPATERRGHRSSRRRTIRKSLRKQLLRELFEEEINAIDKDFFLRLDESKYWLEDKKIEGKYSLFNDENFTDKDYYEKFPTIFHLRKALIESDDKEDIRLYFLAINQMMKRRGHFLIDGKLSNVEDITPFKECIQNLINEELDTEIETEFYDKAIKIVSDYSLKKTEKKNLIKDLVKETDSIEDSKKIINIFNLLISGKSKVNGIFDDEEILEKIKEDNKEDFYLTSEKYEENLEYFSQLLDYRFELISSLKSIYDYIILQEVLKGKKYLSYAQVERYKNHKEDLRKLKQLIKKYDKNGKIYYQIFRDENFKKGYVAYLGYYKKNKKNVPVKKCDYDTFSKNIKSTLDKICDKEDPLYIELIDKIEKGGFLLKQIVSTNSVIPHQVHELELDKILENLEKNYPSFKEISDGVSKIDKIKMIFNFRIPYYVGPLNDYHKDKVNSNTWIVKNEGFENENIRPWNFSKIVDEHACEEEFIKRMINECSYIPGEKVLPKSSLLYSEYMVLNELNNLRVNGDKLNPKIKKEIVENIYKKERKVTLKKIRNFLIINNYVDSKVEFSGLSDGIKANMSSYIDFAEILDDNFDNNMVEDLIEQITIHVGNVKLLTEKISNKYPNLEKKQINKIVNLKFKDWARFSRKLLVGIEGTEKETGEINTIIGFLRETNENFMELMSNRYTFSEEISEIKKKYIPNKLSKQIVDDLYVSPAVKKMIWQVLNINDELIKVLGKQPKKIFIEMARGKEEKPEVKDSRKNKLIELYKNLGKEGKEWLNRIEDKTEADFRNRALYLYYTQMGRCMYTGEIIDIERLYDKELYDLDHIIPRKMKKDDSIHKNLVLVTRNSNQYEKKDNYPVPEVIKSRENVRHLWYALKKKGLITEEKYNRLTRINPLSDKELSEFIERQLVETRQTTKVVKDLFENYYTDSKIVTVKAGLVSELRRDFEVLKCREINDLNHAHDAFLNIIVGDVWSKKFTSNPYNFVKKNREKYTLNNIFTKNQKDLRGNEIWNCAEGKKRIIKTLNKPSVLFSVENFEQTGQLFDQNIIGKQDYKEKTSYVPIKGDERLQDISKYGGYRGISGAYFFIVEHTEKNKRVKTIESLPIYMKSYVEENGLLDFCTNEMKLVDPKIIVKKLNYKSEIIVDGFKYLISGKTENRLSLETNEYLYWNHTQTTDIKKILNINEKIELEKYNGDIESERENIIKYIQIILEKFKLKPFIKRRNLPNIEINFADYETEKLLQLLVNLIPLTTKYVSPVDLTVISGSKYAGKVLIPKKISNLNEVIFISKSITGIYESRRRII

SEQ ID NO: 988 - protein, 1023 aa, Helicobacter cinaedi
MKIYSFDIGVASIGWAFIENEVLQDCGIRIFTKAENPKNGASLALPRREARGVRKRLARRRGRLNTIKQLLCKEFGLQLEDYLSNDGELPKAYTASKANPLKSPYELRTLALSQKLDSKDLVRVILHIAKHRGYGNKHAKDSKDTESGKVKKAIEFNRKTLAEKGYRSVGEYLYREFFQQSRISQNNGATEFINVRNKAGNYEHCVAQDMLKEELESILNAQRQFGFSLKQDFENKLLTKIFEQRPLKSFADKVGNCCFIAGEKRTPKDSLSAIEFIALSRTINTLINLSKESGEIYNRAIILQIVESTLKKGEISYKELREIIRLDERLRFKDPRLDYSREIKEAEKVKFLEFKQLKGFKKALGESFTTLARSQLDEIAEHIALIKDRVKLNEKLESYALTKEQREALSNLSFSAHINLSLQALKQILPFMRGDNGEQCLDYDESVEKAGLKALSKDTLKGQMLPPLNEFEPYLSNPVVARALAEYRKVLNALLKQYGSPHKIHIEYAREAKLSSTERQKYEKEQKDNYAANQAAHKKCQELGLEPSSTNLLKLKLWQEQGGLCLYSGAKITISYLQDPTALQVDHIYPYSRSFDDSYMNKCLVLTKANQEKGNRTPFEAFGTDSAKWGVITTLAQKLPHKKRRRILNTAFNDKEAGFKLRNLNDTSYIARLVADYTETYLEFLPLVESENTTLGKGQKGSKKHIAIVNGALTSTMRYYLGFASKDRDNHLHHALDAVIIGFMNDSVIKAFSDFKKTQETSKAAYYAHTLSKQEYKKQRAFIQLPSGENFRASVLEKVESVFVSKPPRKRVRGALHEATFYSPNDPKLLKNYGGTKGVERALALGKMRKVGAKIVSNGAMVRVDIFRHKSSGKFYGVPVYTMDFALGILPNKAVVVGKDKNGVIKDWLEMDSSYEFIFSLYKDDLLLVQKKEMAEPELCYFMSFNSSIAQISVAKHDNNFSTLTKNQKLLFSNATQEDVSGKSIGIQNLQVFEKWQVSVLGEVKRTQSYPRENISLASKAKK

SEQ ID NO: 989 - protein, 1023 aa, Helicobacter cinaedi
MKIYSFDIGVASIGWAFIENEVLQDCGIRIFTKAENPKNGASLALPRREARGVRKRLARRRGRLNTIKQLLCKEFGLQLEDYLSNDGELPKAYTASKANPLKSPYELRTLALSQKLDSKDLVRVILHIAKHRGYGNKHAKDSKDTESGKVKKAIEFNRKTLAEKGYRSVGEYLYREFFQQSRISQNNGATEFINVRNKAGNYEHCVAQDMLKEELESILNAQRQFGFSLKQDFESKLLTKIFEQRPLKSFADKVGNCCFIAGEKRAPKDSPSAIEFIALSRTINTLINLSKESGEIYNRAIILQIVESTLKKGEISYKELREIIRLDERLRFKDPRLDYSREIKEAEKVKFLEFKQLKGFKKALGESFTTLAISQLDEIAEHIALIKDRVKLNEKLESYALTKEQREALSNLSFSAHINLSLQALKQILPFMRGDNGEQCLDYDESVEKAGLKALSKDTLKGQMLPPLNEFEPYLSNPVVARALAEYRKVLNVLLKQYGSPHKIHIEYAREAKLSSTERQKYEKEQKDNYAANQAAHKKCQELGLEPSSTNLLKLKLWQEQGGLCLYSGAKITISYLQDPTALQVDHIYPYSRSFDDSYMNKCLVLTKANQEKGNRTPFEAFGTDSAKWGVITTLAQKLPHKKRRRILNTAFNDKEAGFKLRNLNDTSYIARLVADYTETYLEFLPLVESENTTLSKGQKGSKKHIAIVNGVLTSTMRYYLGFASKDRDNHLHHALDAVIIGFMNDSVIKAFSDFKKTQETSKAAYYAHTLSKQEYKKQRAFIQLPSGENFRVSVLEKVESVFVSKPPRKRVRGALHEATFYSPNDPKLLKNYGGTKGVERALALGKMRKVGAKIVSNGAMVRVDIFRHKSSGKFYGVPVYTMDFALGILPNKAVVVGKDQNGVIKDWLEMDSSYEFIFSLYKDDVILVQKKEMQRPELCYFVSFDTSGASIKVAKHDNNFSTLTENQKLLFSNATKEEVVGKSIGIQNLKVFEKWQVSVLGEVKRTQSYPRENISLASKAKK

SEQ ID NO: 990 - protein, 344 aa, Helicobacter pullorum
MKILGFDIGIASIGWAFVENGELKDCGVRIFTKAENPKTGDSLAMPRREARSVRRRLARRKGRLETLKRLLAKEWDLCYEDYIAADGELPKAFMGKNLTNPYVLRYEALQRLLSKEELVRVVLHIAKHRGYGNKNAKITKSEESKREQGKILSALATNASVIARYRTVGEYFYKEFCEVIKNPQGLNTNENCTQPKVRVLKPIRNKGGEYTNCILQEDLQRELRCIFEHQKGFGFSITQEFQDKILKIAFYQRSLKDFSHLVGKCTFYPDEPRAPKFSLSAIEFITKAKAINLLASIAKESGEVWDKEQWRERLDSVFSAVCERGINTIPSSSHFLNIFDILYL

SEQ ID NO: 991 - protein, 1688 aa, Ignavibacterium album
MEFKKVLGLDIGTNSIGCALLSLPKSIQDYGKGGRLEWLTSRVIPLDADYMKAFIDGKNGLPQVITPAGKRRQKRGSRRLKHRYKLRRSRLIRVFKTLNWLPEDFPLDNPKRIKETISTEGKFSFRISDYVPISDESYREFYREFGYPENEIEQVIEEINFRRKTKGKNKNPMIKLLPEDWVVYYLRKKALIKPTTKEELIRIIYLFNQRRGFKSSRKDLTETAILDYDEFAKRLAEKEKYSAENYETKFVSITKVKEVVELKTDGRKGKKRFKVILEDSRIEPYEIERKEKPDWEGKEYTFLVTQKLEKGKFKQNKPDLPKEEDWALCTTALDNRMGSKHPGEFFFDELLKAFKEKRGYKIRQYPVNRWRYKKELEFIWTKQCQLNPELNNLNINKEILRKLATVLYPSQSKFFGPKIKEFENSDVLHIISEDIIYYQRDLKSQKSLISECRYEKRKGIDGEIYGLKCIPKSSPLYQEFRIWQDIHNIKVIRKESEVNGKKKINIDETQLYINENIKEKLFELFNSKDSLSEKDILELISLNIINSGIKISKKEEETTHRINLFANRKELKGNETKSRYRKVFKKLGFDGEYILNHPSKLNRLWHSDYSNDYADKEKTEKSILSSLGWKNRNGKWEKSKNYDVFNLPLEVAKAIANLPPLKKEYGSYSALAIRKMLVVMRDGKYWQHPDQIAKDQENTSLMLFDKNLIQLTNNQRKVLNKYLLTLAEVQKRSTLIKQKLNEIEHNPYKLELVSDQDLEKQVLKSFLEKKNESDYLKGLKTYQAGYLIYGKHSEKDVPIVNSPDELGEYIRKKLPNNSLRNPIVEQVIRETIFIVRDVWKSFGIIDEIHIELGRELKNNSEERKKTSESQEKNFQEKERARKLLKELLNSSNFEHYDENGNKIFSSFTVNPNPDSPLDIEKFRIWKNQSGLTDEELNKKLKDEKIPTEIEVKKYILWLTQKCRSPYTGKIIPLSKLFDSNVYEIEHIIPRSKMKNDSTNNLVICELGVNKAKGDRLAANFISESNGKCKFGEVEYTLLKYGDYLQYCKDTFKYQKAKYKNLLATEPPEDFIERQINDTRYIGRKLAELLTPVVKDSKNIIFTIGSITSELKITWGLNGVWKDILRPRFKRLESIINKKLIFQDEDDPNKYHFDLSINPQLDKEGLKRLDHRHHALDATIIAATTREHVRYLNSLNAADNDEEKREYFLSLCNHKIRDFKLPWENFTSEVKSKLLSCVVSYKESKPILSDPFNKYLKWEYKNGKWQKVFAIQIKNDRWKAVRRSMFKEPIGTVWIKKIKEVSLKEAIKIQAIWEEVKNDPVRKKKEKYIYDDYAQKVIAKIVQELGLSSSMRKQDDEKLNKFINEAKVSAGVNKNLNTTNKTIYNLEGRFYEKIKVAEYVLYKAKRMPLNKKEYIEKLSLQKMFNDLPNFILEKSILDNYPEILKELESDNKYIIEPHKKNNPVNRLLLEHILEYHNNPKEAFSTEGLEKLNKKAINKIGKPIKYITRLDGDINEEEIFRGAVFETDKGSNVYFVMYENNQTKDREFLKPNPSISVLKAIEHKNKIDFFAPNRLGFSRIILSPGDLVYVPTNDQYVLIKDNSSNETIINWDDNEFISNRIYQVKKFTGNSCYFLKNDIASLILSYSASNGVGEFGSQNISEYSVDDPPIRIKDVCIKIRVDRLGNVRPL

SEQ ID NO: 992 - protein, 1354 aa, Indibacter alkaliphilus
MKKILGLDLGTTSIGWAFIKEPEKDVVGSEIVDMGVRIVPLSSDEENDFAKGNTISINADRTLKRGARRNLQRFKQRRNALLETFKEKNLIPSNFQYAEDGPSSTFSTLKLRDKAAKEKIELDDFVKVLLQINKKRGYKSSRKAMSEEDEGTAIDSMGIAKELYENDLTPGQWVYEALKNGRKNVPDFYRSDLQEEFKKIVNYQSEFYPDILNTSFVEDWMGKASTPTKQYFNKRGVQLAENKGKREERRLQEYKWRAEAVNFKIDLSEIALILSQINSQISNSSGYLGAISDRSKELYFKNLTVGQYLYQQVKKNPHTRLKGQVFYRQDYLDEFEKIWSVQSSFYPQLNDELKQEVRDVTIFFQRRLKSQKHLISNCEFEEHHKVVPKSHPIFQEFRIWQNLNNLTLIKKDNLNEKCELALEDKTALANELAFKKELSVKDALKVLGLKPSDWEFNFTKIEGNRTNHAFFEAFAKIIELEDGEPIDLGNLKADDILDQFSEAFLRIGIDTELLQVNSDIEGAEYEKQSYIQFWHLLYSSEDDQKLKQNLIRKFGFKPEHAKILASISLQDDHASLSSRAIKKILPHLQSGLIYDKACTYAGYNHSSSFTKDENEKRELRAELELLKKNSLRNPVVEKILNQMINVVNAILKDPNLGRPDEIRVEMARELKANAEQRKNMTSNIASATRDHEKYREILKKEFGLKRVTKNDLLRYKLWLETDGISLYTGKPIEASKLFSKEYDIEHIIPKARLFDDSFSNKTICERQLNIDKANVTAFSFLQNKLSADEFEQYQSRVKSLYGKLSKAKIQKLLMANDKIPEDFIARQLQETRYISKKAKEILFEITMRVSVTTGTITDKLREDWGLVEIMKELNWEKYDKLGLTYTIEGKHGERLNKIKDWNKRNDHRHHAMDALTVALTKPAYIQYLNNLNAKAIGNKKGTEIFAIEQKYLKRENGKLCFIPPIENIRAEAKKHLSKILVSYKAKNKVVTINKNKTKKKAGFNEQTALTPRGQLHKETVYGKSFHYSTKFEKIGASFDAQKINTVAKKEEREALLKRLAENGNDPKKAFTGKNSLNKMPIYLDLGKNIKLSEKVKTVVLEQNYTIRKNIDPDLKVDKVIDVGIKRILESRLEEFGGNAKLAFSNLEENPIWLNKEKGIPIKRVKISGVSNVESLHVKKDHFGEKILDEEGNEIPVDFVSTGNNHHVAIYEDEDGNLQDEVVNFYEAVIRRNQGESIIKYRHEEGWNFLYSIKQNEFFVFPSQDFNPNDFDLLDPKNYDLISPNLYRAQKFSKVMYGNSAVRDYVFRHHLETVLNDVKELKDVAYKQLKSLQYLNGIKKVRLNHLGQIIQVGEY

SEQ ID NO: 993 - protein, 1397 aa, Joostella marina
MKKVLGLDLGTNSIGWALVNEATKEEKKEGKSSEIIKLGVRVNPLTVDEKTNFEKGRPLSTNADRTLKRSARRNLQRYKLRRRNLIEILIKNGFITKDTPLTETGKDTTHQTLKLRAKSAKEKVDLKDFAKILLTINKKRGYKSSRKVNSDEDGLAIDGMAVAKHLYEQNLTPGQYVLNLLQKNKKYVPDFYRSDLQEEFKNIWNNQKTYYFDILTDTLFEELKDKNKSQTWAICKKPFDIAGIKQIGKASDKRLERYKWRTEGLTQKLNLEYLAIALQEINNDINKSSGYLGAISDRSKELFFNKETVGENLYRQLVKTPHTSLRNQVFYRQDYLDEFETIWETQAKFYPQLTHTLKEEIRDVIIFYQRKLKSQKSLISFCQFESWEQTYIEKETGKSKTRTVGRKVIPKSSPLFQEFKIWQNLNSLEFRNSDEGEIIEFIKLDEDIRQTVFEELNLRGNLKPNDVLKILGNYISLGKVSQWKCNFEEIEGNRTNAALYNVYQIIAENEGYGFDWAKKTASEINKELKNIFPQLGIDASILDFDFTQANFDKQTSYQLWHLLYSAEEDFKISEEDKVLYGNSSVSLKKKLHQKYGFKPEYTKLLTNISLQPDYGNLSAKAICNILPYLKENNVYSEACDLTGYNHSNFLTAEEQAKRPLKPILELLKKNSLRNPVVEKILNQMVNVVNQVIETYGKPDEIRIELTRELKKSAKERANMTKSIADATRRNDDYRKTIIKEFGIPNPTKSDVVRYRLWQELASRGYKDIFTDTEIKPQELFSNKIDIEHIIPKALLFDDSFSNKTLAFKKDNLKKANRTAYDFIANDYAPNLENYIERVESLHKDRKITRAKRNKLLMLQSKLPDGFIERDLRNSQYITKEAKKMLYEVCRTVVSTSGSITDKLREDWDLINVMKELNFPKYKALGLTEKIERYDIGAEKMKEVEIIEDWNKRNDHRHHAIDALTVAFSTHSHIQYLNHLNARRDEGHKKHAAIIAIESTITEKEGNKKRRFIAPLPNFRLQAKEHIESILVSFKNKNKVVTNNINKTKRIKKDKFNTKVQLTPRGQLHKETIYGKIKQPLEKHIKLNKSFTLEQAKLIIDKRQREKVLNHLEKYAHNSDIAFNSKTLKKNPLLISDEPLKEVLCFEEVFTIRKDISYDNFKNEKQLDKVIDEKVKQALKERINQYNGDFREAFSDIERNPIWLNKAKGICVKRATIKGVSNAEPLHTAKNHLGEEVLTENKEQIPVDYVSTGNNHHVAIYEDEDGNLQEKVVSFYEAVIRVNEGLPIIDKEYNKSLGWTFKFTMKQNEMFVFPSEDFNPTEIDLLDQKNASLISPNLFRVQKFTIKDYFFRHHLETTVENNNTLKNTTWRREGLSGIYGIIKIRLNHLGEIVQVGEY

SEQ ID NO: 994 - protein, 1060 aa, Kingella kingae
MAAKSLNYILGLDLGIASCGWAVVEMDEQENPLRLIDVGVRTFEEAENPKDGSSLAETRRLARAQRRLISRRANRMNKLCRLLKQENVLQANDYDEKGLIIGLPNQAWELRAQGLDRKLEPKEWAAVLIHLVKHRGYLSQRKNESQTADKELGALLSGMNHNHQLLQSQSNQYRTPAELAIKQFATQDGHIRNQRGAYTHTFNRLDLQNELNQLFDAQTRLGNPHVSGSLKTAINDLLMNQKAALSGDAILEMLGRCTFEPSEYKAAKNTYSAERFVWLGKLTNLRIQDNGLESALSREQRELLLNEPYNKTKLTYQQVRKLLRLPETAFFKGLRYGKDNAESATFMEMKSYHAIRKSLENKSLKSEWEKLKTQPKLLDLIGTAFSIYKTDDEIAGCLKNQLPENVIIALQGQLNFSNFMELSLKALEKLLPLMEQGLRYDEACTQIYGNRHEKIADKTEKFLPNIPADKLRNPVVLRTLTQARKVINAIIRRYGSPARVHIETGREVGKSFSDRDKLKKQQEENQEQRRRAIDEWKQFFPNAAHEPKAVDILKLRLYQLQQGKCLYSGLPIDVRRLPEKGYVEIDHALPFSRTWDDSFNNKILVLASENQNKGNQTPYEYLRGADNSESWRLFVENVQNCQFSPNKKQKIMAKQLDEKGFLERNLNDTRYVSRFLCQFISEHLHLTGKGKKRVFASNGQITALLRGRWGLSKNREENDRHHAVDAVVVACSTVAMQQKITQFVRYQKGNVFTGERIDKETGEVISIHFPTPWEHFREEVMIRVFDDNPLRTLPEKLPNRPEALHEYVMPLFVSRMPTRKMTGQGHKETIKSAKRLDEKISVLRVPLTQLKLNDLENMVNREREPALYEALKARLEQFKNDPAKAFAEPFFKQGGQQVKAVRVEIVQKSGMLLRKINGVADNGSMVRVDVFEKSGKFYLVPIYAWQVAEGILPNYAVVAHKDESDWILMDESYHFKFALYKNDLLEVQTKKGGIMGYFASLDRATGAITIREHDRDKKKCKDGEHRSIGVKMASSFKKLQVDELGKNIHETRSRKRPNIG

SEQ ID NO: 995 - protein, 1314 aa, Lactobacillus animalis
MLKKDYSIGLDIGTNSVGHAVVTDDYKVPTKKMKVFGDTSKKTIKKNMLGVLLFNEGQTAADTRLKRGTRRRYTRRKNRLRYLQEIFAPELAKVDPNFLYRLEESSLVAEDKKYDVYPIFGKREEELLYHDTYKTIYHLRSALANNDQPADLRLVYLALAHIIKYRGNFLLEGEIDLRTTDINKVFAEFSETLNENSDENLGKLDVADIFKNNTFSKTKKSEELLKLSGAKKNQLAHQLFKMMVGNMGSFKKVLGTDEEHKLSFGKDTYEDDLNDLLAEAGDQYLDIFVAAKKVYDAAILASILDVKDTQTKTVFSQAMIERYEEHQKDLIELKRVFKKYLPEKCHDFFSEPKISGYAGYIDGKVSEEDFYKYTKKTLKGIPETEEILQKIDANNYLRKQRTFDNGAIPHQVHLKELVAIVENQGKYYPFLRENKDKFEKILNFRIPYYVGPLARGNSKFAWLTRAGEGKITPYNFDEMIDKETSAEDFIKHMTINDLYLPTEPVLPKHSLLYERYTIFNELAGVRYVTENGEAKYFDAQTKRSIFELFKLDRKVSEKMVIKHLKVVMPAIRIQALKGLDNGKFNASYGTYKDLVDMGVAPELLNDEVNSEKWEDIIKTLTIFEGRKLIKRRLENYRDFLGEDILRKLSRKKYTGWGRLSAKLLDGIYDKKTHKTILDCLMTEDYSQNFMQLINDDNYSFKETIKNAQVIEKEETLAKTVQELPGSPAIKKGILQSLEIVDEIIKVMGYKPKSIVVEMARETQKTHGTRKREDRVQQIVENLKDANELPEKLPSNAELSDERKYLYCLQNGRDMYTGAPLDYDHLQFYDVDHIIPQSFLKDDSIENKVLTIKKENVRKTNGLPSEAVIQKMGSFWKKLLDAGAMTNKKYDNLRRNLHGGLNEKLKERFIERQLVETRQITKYVAQLLDQRLNYDGNGVELDEKIAIVTLKAQLASQFRSEFKLRKVRALNNLHHAHDAYLNAIVANLIMAKYPELEPEFVYGKYRKAKFKGLGKATAKNTLYANVLYFLKENEVYPFWDKARDLPTIKRYLYRAQVNKVRKAERQIGGFSDEMLVPKSDSGKLLPRKEGLDPVKYGGYAKAVESYAVLITADEVKKGKTKKVKTLVNIPIIDSKKYEADPTAYLASRGYTNVTNSFILPKYSLLEDPEGRRRYLASFKEFQKANELILPQHLVELLYWVNAKDGEQKLEDHKAEFKELFDKIMEFADKYVVAPKNSEKIRRLYEENQDATPMELGKNFVELLRYTADGAASDFKFFGENIPRKRYNSAGSLLNGTLIYQSKTGLYETRIDLGKL

SEQ ID NO: 996 - protein, 1371 aa, Lactobacillus buchneri
MKVNNYHIGLDIGTSSIGWVAIGKDGKPLRVKGKTAIGARLFQEGNPAADRRMFRTTRRRLSRRKWRLKLLEEIFDPYITPVDSTFFARLKQSNLSPKDSRKEFKGSMLFPDLTDMQYHKNYPTIYHLRHALMTQDKKFDIRMVYLAIHHIVKYRGNFLNSTPVDSFKASKVDFVDQFKKLNELYAAINPEESFKINLANSEDIGHQFLDPSIRKFDKKKQIPKIVPVMMNDKVTDRLNGKIASEIIHAILGYKAKLDVVLQCTPVDSKPWALKFDDEDIDAKLEKILPEMDENQQSIVAILQNLYSQVTLNQIVPNGMSLSESMIEKYNDHHDHLKLYKKLIDQLADPKKKAVLKKAYSQYVGDDGKVIEQAEFWSSVKKNLDDSELSKQIMDLIDAEKFMPKQRTSQNGVIPHQLHQRELDEIIEHQSKYYPWLVEINPNKHDLHLAKYKIEQLVAFRVPYYVGPMITPKDQAESAETVFSWMERKGTETGQITPWNFDEKVDRKASANRFIKRMTTKDTYLIGEDVLPDESLLYEKFKVLNELNMVRVNGKLLKVADKQAIFQDLFENYKHVSVKKLQNYIKAKTGLPSDPEISGLSDPEHFNNSLGTYNDFKKLFGSKVDEPDLQDDFEKIVEWSTVFEDKKILREKLNEITWLSDQQKDVLESSRYQGWGRLSKKLLTGIVNDQGERIIDKLWNTNKNFMQIQSDDDFAKRIHEANADQMQAVDVEDVLADAYTSPQNKKAIRQVVKVVDDIQKAMGGVAPKYISIEFTRSEDRNPRRTISRQRQLENTLKDTAKSLAKSINPELLSELDNAAKSKKGLTDRLYLYFTQLGKDIYTGEPINIDELNKYDIDHILPQAFIKDNSLDNRVLVLTAVNNGKSDNVPLRMFGAKMGHFWKQLAEAGLISKRKLKNLQTDPDTISKYAMHGFIRRQLVETSQVIKLVANILGDKYRNDDTKIIEITARMNHQMRDEFGFIKNREINDYHHAFDAYLTAFLGRYLYHRYIKLRPYFVYGDFKKFREDKVTMRNFNFLHDLTDDTQEKIADAETGEVIWDRENSIQQLKDVYHYKFMLISHEVYTLRGAMFNQTVYPASDAGKRKLIPVKADRPVNVYGGYSGSADAYMAIVRIHNKKGDKYRVVGVPMRALDRLDAAKNVSDADFDRALKDVLAPQLTKTKKSRKTGEITQVIEDFEIVLGKVMYRQLMIDGDKKFMLGSSTYQYNAKQLVLSDQSVKTLASKGRLDPLQESMDYNNVYTEILDKVNQYFSLYDMNKFRHKLNLGFSKFISFPNHNVLDGNTKVSSGKREILQEILNGLHANPTFGNLKDVGITTPFGQLQQPNGILLSDETKIRYQSPTGLFERTVSLKDL

SEQ ID NO: 997 - protein, 315 aa, Lactobacillus casei
MFKDYLKQLEDDGTAKAIRQLYDRYIDGDDAKPFVREDFVKALTKEVTAHPNAKSPELLERLAQPDFMLKQRNKANGAIPVQMQQRELDQIIKNQSVYYDWLAAPNPVEKHRKSMPYQLDELLNFRIPYYVGPLVTAKEQKAARGGVFAWMVRKDPDGNITPYNFDEKVDREASANTFIQRMKTTDTYLIGEDVLPKQSLLYQSYEVLNELNNVRVNDNKLSFDQKQQVLGELFERHNTVTIKQFVDNLLAHGDYDRIPEVRGLADEKRFLSSLSTYNQLKGILHEAIDDSDKQTDMVDCKINPNAVRTKKISFL

SEQ ID NO: 998 - protein, 236 aa, Lactobacillus casei
MFKDYLKQLEDDGTAKAIRQLYDRYIDGDDAKPFVREDFVKALTKEVTAHPNAKSPELLERLAQPDFMLKQRNKANGAIPVQMQQRELDQIIKNQSVYYDWLAAPNPVEKHRKSMPYQLDELLNFRIPYYVGPLVTAKEQKAARGGVFAWMVRKDPDGNITPYNFDEKVDREASANTFIQRMKTTDTYLIGEDVLPKQSLLYQSYEVLNELNNVRVNDNKLSSSIFKSSATMITNS

SEQ ID NO: 999 - protein, 1389 aa, Lactobacillus casei
MIIRTYELKTITTIAILKMFQLLTGGLSMTKLGKPYGIGVDIGSNSIGFAAVDENSHLIRLKGKTVIGARLFEEGKAAADRRASRTTRRRLSRNRWRLSFLRDFFESHITPTGPNFFMRQKYSEISPKDKARYKYEKRLFNDRTDAEFYQQYPTMYHLRNRLLTDPSKADVREIYFAIHHILKSRGHFLTSGYAKDFNTNKVALNEIFPALQDAYAQVYPDLDITFDENKVNEFKTVLLNEKATPSDTQRALVNLLLAEDGDKDILKQQKQVLTEFAKAVVGLKTKLNVALGTEVDSSEATVWNFSLGQLDDKWAGIESAMTDEGTEILDQIRDLYRARLLNGIVPAGKTLSQAKVDDYAQHHEDLELFKDYLKQLEDDGTAKAIRQLYDRYIDGDDAKPFVREDFVKALTKEVTAHPNAKSPELLERLAQPDFMLKQRNKANGAIPVQMQQRELDQIIKNQSVYYDWLAAPNPVEKHRKSMPYQLDELLNFRIPYYVGPLVTAKEQKAAQGGVFAWMVRKDPDGNITPYNFDEKVDREASANTFIQRMKTTDTYLIGEDVLPKQSLLYQRYEVLNELNNVRVNNEKLSIEQKQQVIRELFERHNSVTIKQFAENLRAHGDYAHIPEIRGLADEKRFLSSLSTYRQLKSLLPDAIDDPAKQADIENIIAWSTVFEDAAIFKTKLKEINWLDSQTITKLSNIRYRGWGQFSHKFLNGLTLGNGHTIIQELFLSNNNLMQILTDETLQKKMTELNADKLKAANINDAIDDAYTSPSNKKALRQVLRVIEDIKRAADGQDPSWLYVETADGGGTPGKRTRARQHQLQEIYANAAHELIDSAVRGELEDKIADKADFNDRLVLYFMQGGRDIYTGTPLNIDQLSSYDIDHILPQSLIKDNSLDNRVLVHAIINREKNATFASTIYAQKMNATWRQWHEAGLISGRKLRNLQMRPDQIDKYASGFVARQLVETRQIIKLTEQIVAAQYPETKIIAVKAGLSHQLREELEFPKNRDVNHYHHAFDAFLAARIGTYLLKRFPNLQAFFTYGKFKKADVKKLRGFNFIRDITHAEDKIVVKDTGEVIWDKKRDVDELDRIYNFKRMLITHEVHFEKADLFKQTVYGAKDSKEAGGKKQLISKKKGYPVDIYGGYTQETGSYLSVVRLTKKAMYAVVKVSTRDAAKLAVAKSISEQKENETLNDIIDEKLSKISKNGKITHELFEVVLPRVGQKTLFKNSKYNLFLVNSDTYMHNYQELWMPREYQKMWKDISLSKYGDAQTEDQLDQIFGFIVSQVNSYFNLYDINQFRKKLNDAADKFATLPMRDTDDMQGKIATIGQLLIGLQANAARSDLRNLDIKTPLGLLQIPNGISLDSDTSVVYQSPTGLLEREVHLSDL

SEQ ID NO: 1000 - protein, 412 aa, Lactobacillus casei
MIKDNSLDNRVLVHPLVNREKDTIFASTRFAKQTNGMWRQWHAAGLISSRKLRNLQMRPDEIDKYASGFVARQLVETRQIIKLTEQIVADQYPDTKIIAVKAGLSSQLRKELDFPKNREVNHYHHAFDAFLAARIGTYLLKRYPNLEPFFTYGKFKKTEVKKLKSFNFIRDMTHAKDKIVAKETGEIVWDNASDINELDRIYNFKRMLITHEVRFETASLFKQTLYAAKNPKNRGGSRQLIPKKKGYLVDIYGGYTQETGSYLSVVRLTKKAMYAVVKVSTRDAAKLAVAKSISEQKENETLKKIIDGKLSKTSKKGKTTHQLFEIVLPRVGQKTLFKNSKYNQFLVNSDTYMHNYQELWMPREYQRMWKDILLSNHGDAQIEGQLDQIFKFIVSQVNSYFNLYDINQFRKK

SEQ ID NO: 1001 - protein, 234 aa, Lactobacillus casei
MKVTKKTETIFKVVKIATSQVAALNKARSRSTAEELSVLTELLKPKFSKVGKNGKITDTPFEVVLPRVPREQLFYNAKYGFFMVNSDTMFHNFQEIWVSRSDQKILQQIRKAKIDYPNVDQDLDNLFHNLADQIVKYFDLYSIAGFKEKISQSQNTFNDLAVDDTDQSVGKITVINELLKGAQANGMTGSLKVLKISTPFGFTQDKSGVLTKDSSIIYQSPTGLFERSVRLTDL

SEQ ID NO: 1002 - protein, 566 aa, Lactobacillus casei
MQILTDEVLKQKIAELNAHELKASGIYAAIDDAYTSPSNKKALRQVLSVIDDITNAAGQAPNWLYIETADGDGVPGKRTNSRQRKIQEIYVNAAQELITSSVRGELEDKIASRADFTDRLVLYFMQGGRDIYTGEPLNIDNLSSYDIDHILPQSLIKDNSLDNRVLVHPLVNREKDTIFASTRFAKQMNGMWRQWHAAGLISSRKLRNLQMRPDEIDKYASGFVARQLVETRQIIKLTEQIVADQYPDAKIIAVKAGLSSQLRKELDFPKNREVNHYHHAFDAFLAARIGTYLLKRYPNLEPFFTYGKFKKTEVKKLKSFNFIRDMTHAKDKIVAKETGEIVWDNASDINELDRIYNFKRMLITHEVRFETASLFKQTLYAAKNSKNRGGSRQLIPKKKGYLVDIYGGYTQETGSYLSVVRLTKKAMYAVVKVSTRDAAKLAVAKSISEQKENETLKKIIDGKLSKTSKKGKTTHQLFEIVLPRVGQKTLFKNSKYNQFLVNSDTYMHNYQELWMPREYQRMWKDILLSNHGDAQLEGQLDQIFKFIVSQVNSYFNLYDINQFRKK

SEQ ID NO: 1003 - protein, 1363 aa, Lactobacillus casei
MTKLGKPYGIGVDIGSNSIGFAAVDENSHLIRLKGKTVIGARLFEEGKAAADRRASRTTRRRLSRNRWRLSFLRDFFESHITPTDPNFFMRQKYSEISPKDKARYKYEKRLFNDRTDAEFYQQYPTMYHLRNRLLTDPSKADVREIYFAIHHILKSRGHFLTSGYAKDFNTNKVALNEIFPALQDAYAQVYPDLDITFDENKVNEFKTVLLDEKATPSDTQRALVNLLLAEDGDKDILKQQKQVLTEFAKAVVGLKMKLNVALGTEVDSSEATAWNFSLGQLDDKWAGIESAMTDEGTEILDQIRDLYRARLLNGIVPAGKTLSQAKVDDYEQHHEDLELFKDYLKQLEDDGMAKVIRQLYDRYIDGDDAKPFVREDFVKALTKEVTAHPNAKSPELLERLVQPDFMLKQRNKANGAIPVQMQQRELDQIIKNQSVYYDWLAAPNPVEKHRQSMPYQLDELLNFRIPYYVGPLVTAKEQKAAQGGVFAWMVRKDPDGNITPYNFDEKVDREASANTFIQRMKTTDTYLIGEDVLPKQSLLYQSYEVLNELNNVRVNDNKLSFDQKQQVLGELFERHNTVTIKQFVDNLLAHGDYDRIPEVRGLADEKRFLSSLSTYNQLKGILHEAIDDSDKQTDIEKIIAWSTIFEDKAIFKTKLNEISWLTAGMINSLANIRYRGWGQFSHKLLNELTLSTGRTVFEELLISSHNLMQILTDEVLKQKIAELNAHELKASGIYAAIDDAYTSPSNKKALRQVLSVIDDITNAAGQAPNWLYIETADGDGVPGKRTNSRQRKIQEIYANAAQELITGSVRGELEDKIASRADFTDRLVLYFMQGGRDIYTGEPLNIDNLSSYDIDHILPQSLIKDNSLDNRVLVHPLVNREKDTIFASTRFAKQMNGMWRQWHAAGLISSRKLRNLQMRPDEIDKYASGFVARQLVETRQIIKLTEQIVADQYPDAKIIAVKAGLSSQLRKELDFPKNREVNHYHHAFDAFLAARIGTYLLKRYPNLEPFFTYGKFKKTEVKKLKSLKSFNFIRDMTHAKDKIVAKETGEIVWDNASDINELDRIYNFKRMLITHEVRFETASLFKQTLYAAKNSKNRGGSRQLIPKKKGYLVDIYGGYTQETGSYLSVVRLTKKAMYAVVKVSTRDAAKLAVAKSISEQKENETLKKIIDGKLSKTSKKGKTTHQLFEIVLPRVGQKTLFKNSKYNQFLVNSDTYMHNYQELWMPREYQRMWKDILLSNHGDAQLEGQLDQIFKFIVSQVNSYFNLYDINQFRKKIADATDKFAKLPTHDTDNARGKIATIGQLLIGLQANAMRSDLRNLDIKTPFGLLQIGTGITLDLDTSIIYQSPTGLFEREVPLTDL

SEQ ID NO: 1004 - protein, 1360 aa, Lactobacillus casei
MTKLGKPYGIGVDIGSNSIGFAAVDENSHLIRLKGKTVIGARLFEEGKAAADRRASRTTRRRLSRNRWRLSFLRDFFESHITPTDPNFFMRQKYSEISPKDKARYKYEKRLFNDRTDAEFYQQYPTMYHLRTRLLTDPSKADVREIYFAIHHILKSRGHFLTPGYAKDFNTNKVALNEIFPALQDAYAQVYPDLDITFDENKVNEFKTVLLNEKATPSDTQRALVNLLLAEDGDKDILKQQKQVLTEFAKAVVGLKTKLNVALGTEVDSSEATVWNFSLGQLDDKWAGIESAMTDEGTEILDQIRDLYRARLLNGIVPAGKTLSQAKVDDYAQHHEDLELFKDYLKQLEDDGTAKAIRQLYDRYIDGDDAKPFVREDFVKALTKEVTAHPNAKSPELLERLAQPDFMLKQRNKANGAIPVQMQQRELDQIIKNQSVYYDWLAAPNPVEKHRKSMPYQLDELLNFRIPYYVGPLVTAKEQKAAQGGVFAWMVRKDPDGNITPYNFDEKVDREASANTFIQRMKTTDTYLIGEDVLPKQSLLYQSYEVLNELNNVRVNDNKLSFDQKQQVLGELFERHNTVTIKQFVDNLLAHGDYDRIPEVRGLADEKRFLSSLSTYNQLKGILHEAIDDADKQTDIENIIAWSTIFEDKAIFKTKLNEISWLNAGMINSLANIRYRGWGQFSHKLLNELTLSTGRTVFEELLISSRNLMQILTDEVLKQKIAELNAHELKASGIYAAIDDAYTSPSNKKALRQVLSVIDDITNAAGQAPNWLYIETADGDGVPGKRTNSRQRKIQEIYANAAQELITGSVRGELEDKIASRADFTDRLVLYFMQGGRDIYTGEPLNIDNLSSYDIDHILPQSLIKDNSLDNRVLVHPLVNREKDTIFASTRFAKQMNGMWRQWHAAGLISSRKLRNLQMRPDEIDKYASGFVARQLVETRQIIKLTEQIVADQYPDTKIIAVKAGLSSQLRKELDFPKNREVNHYHHAFDAFLAARIGTYLLKRYPNLEPFFTYGKFKKTEVKKLKSFNFIRDMTHAKDKIVAKETGEIVWDNASDINELDRIYNFKRMLITHEVRFETASLFKQTLYAAKNSKNRGGSRQLIPKKKGYLVDIYGGYTQETGSYLSVVRLTKKAMYAVVKVSTRDAAKLAVAKSISEQKENETLKKIIDGKLSKTSKKGKTTHQLFEIVLPRVGQKTLFKNSKYNQFLVNSDTYMHNYQELWMPREYQRMWKDILLSNHGDAQLEGQLDQIFKFIVSQVNSYFNLYDINQFRKKIADATDKFAKLPTHDTDNARGKIATIGQLLIGLQANAMRSDLRNLDIKTPFGLLQIGTGITLDLDTSIIYQSPTGLFEREVPLTDL

SEQ ID NO: 1005 - protein, 700 aa, Lactobacillus casei
MTKLGKPYGIGVDIGSNSIGFAAVDENSHLIRLKGKTVIGARLFEEGKAAADRRASRTTRRRLSRNRWRLSFLRDFFESHITPTDPNFFMRQKYSEISPKDKARYKYEKRLFNDRTDAEFYQQYPTMYHLRTRLLTDPSKADVREIYFAIHHILKSRGHFLTSGYAKDFNTNKVALNEIFPALQDAYAQVYPDLDITFDENKVNEFKTVLLDEKATPSDTQRALVNLLLAEDGDKDILKQQKQVLTEFAKAVVGLKTKLNVALGTEVDSSEATAWNFSLGQLDDKWAGIESAMTDEGTEILDQIRDLYRARLLNGIVPAGKTLSQAKVDDYEQHHEDLELFKDYLKQLEDDGMAKAIRQLYDRYIDGDDAKPFVREDFVKALTKEVTAHPNAKSPELLERLVQPDFMLKQRNKANGAIPVQMQQRELDQIIKNQSVYYDWLAAPNPVEKHRQSMPYQLDELLNFRIPYYVGPLVTAKEQKAAQGGVFAWMVRKDPDGNITPYNFDEKVDREASANTFIQRMKTTDTYLIGEDVLPKQSLLYQSYEVLNELNNVRVNDNKLSFDQKQQVLGELFERHNTVTIKQFVDNLLAHGDYDRIPEVRGLADEKRFLSSLSTYNQLKGILHEAIDDSDKQTDIEKIIAWSTIFEDKAIFKTKLNEISWLNAGMINSLANIRYRGWGQFSHKLLNELTLSTGRTVFEA

SEQ ID NO: 1006 - protein, 330 aa, Lactobacillus casei
MTKLGKPYGIGVDIGSNSIGFAAVDENSHLIRLKGKTVIGARLFEEGKAAADRRASRTTRRRLSRNRWRLSFLRDFFESHITPTDPNFFMRQKYSEISPKDKNRYKYEKRLFNDRTDAEFYQQYPTMYHLRNRLLTDPSKADVREIYFAIHHILKSRGHFLTPGDAKDFNTNKVALNEIFPALQDAYAQVYPDLDITFDENKMNEFKTVLLNEKATPSDTQRALVNLLLAEDGDKDILKQQKQVLTEFAKAVVGLKTKLNVALGTEVDSSEATAWNFSLGQLDDKWAGIESAMTDEGTEILDQIRDLYRARLLNGIVPAGKTLSQAKVDD

SEQ ID NO: 1007 - protein, 330 aa, Lactobacillus casei
MTKLGKPYGIGVDIGSNSIGFAAVDENSHLIRLKGKTVIGARLFEEGKAAADRRASRTTRRRLSRNRWRLSFLRDFFESHITPTDPNFFMRQKYSEISPKDKNRYKYEKRLFNDRTDAEFYQQYPTMYHLRNRLLTDPSKADVREIYFAIHHILKSRGHFLTPGDAKDFNTNKVALNEIFPALQDAYAQVYPDLDITFDENKMNEFKTVLLNEKATPSDTQRALVNLLLAEDGDKDILKQQKQVLTEFAKAVVGLKTKLNVALGTEVDSSEATAWNFSLGQLDDKWAGIESAMTDEGTEILDQIRDLYRARLLNGIVPAGKTLSHAKVDD

SEQ ID NO: 1008 - protein, 1361 aa, Lactobacillus casei
MTKLGKPYGIGVDIGSNSIGFAAVDENSHLIRLKGKTVIGARLFEEGKAAADRRASRTTRRRLSRNRWRLSFLRDFFESHITPTGPNFFMRQKYSEISPKDKARYKYEKRLFNDRTDAEFYQQYPTMYHLRNRLLTDPSKADVREIYFAIHHILKSRGHFLTSGYAKDFNTNKVALNEIFPALQDAYAQVYPDLDITFDENKVNEFKTVLLNEKATPSDTQRALVNLLLAEDGDKDILKQQKQVLTEFAKAVVGLKTKLNVALGTEVDSSEATVWNFSLGQLDDKWAGIESAMTDEGTEILDQIRDLYRARLLNGIVPAGNTLSQAKVDDYAQHHEDLELFKDYLKQLEDDGTAKAIRQLYDRYIDGDDAKPFVREDFVKALTKEVTAHPNAKSPELLERLAQPDFMLKQRNKANGAIPVQMQQRELDQIIKNQSVYYDWLAAPNPVEKHRKSMPYQLDELLNFRIPYYVGPLVTAKEQKAAQGGVFAWMVRKDPDGNITPYNFDEKVDREASANTFIQRMKTTDTYLIGEDVLPKQSLLYQRYEVLNELNNVRVNNEKLSIEQKQQVIRELFERHNSVTIKQFAENLRAHGDYAHIPEIRGLADEKRFLSSLSTYRQLKSLLPDAIDDPAKQADIENIIAWSTVFEDAAIFKTKLKEINWLDSQTITKLSNIRYRGWGQFSHKFLNGLTLGNGHTIIQELFLSNNNLMQILTDETLQKKMTELNADKLKAANINDAIDDAYTSPSNKKALRQVLRVIEDIKRAADGQDPSWLYVETADGGGTPGKRTRARQHQLQEIYANAAHELIDSAVRGELEDKIADKADFNDRLVLYFMQGGRDIYTGTPLNIDQLSSYDIDHILPQSLIKDNSLDNRVLVHAIINREKNATFASTIYAQKMNATWRQWHEAGLISGRKLRNLQMRPDQIDKYASGFVARQLVETRQIIKLTEQIVAAQYPETKIIAVKAGLSHQLREELEFPKNRDVNHYHHAFDAFLAARIGTYLLKRFPNLQAFFTYGKFKKADVKKLRGFNFIRDITHAEDKIVVKDTGEVIWDKKRDVDELDRIYNFKRMLITHEVHFEKADLFKQTVYGAKDSKEAGGKKQLISKKKGYPVDIYGGYTQETGSYLSVVRLTKKAMYAVVKVSTRDAAKLAVAKSISEQKENETLNDIIDEKLSKISKNGKITHELFEVVLPRVGQKTLFKNSKYNLFLVNSDTYMHNYQELWMPREYQKMWKDISLSKYGDAQTEDQLDQIFGFIVSQVNSYFNLYDINQFRKKLNDAADKFATLPMRDTDDMQGKIATIGQLLIGLQANAARSDLRNLDIKTPLGLLQIPNGISLDSDTSVVYQSPTGLLEREVHLSDL

SEQ ID NO: 1009 - protein, 1128 aa, Lactobacillus casei
MTKLGKPYGIGVDIGSNSIGFAAVDENSHLIRLKGKTVIGARLFEEGKAAAKRRAGRTTRRRLSRNRWRLSFLRDFFESHITPTDPNFFMRQKYSEISPKDKARYKYEKRLFNDRTDAEFYQQYSTMYHLRNRLMTDPSRADVREIYFAIHHILKSRGHFLTPGDAKDFNTNDVALDEIFPALQDAYAQVYPDLGITFDEDKANEFKTILLNEIATSIDTQRALVKLLLAEEDDKDILKQQKQVLTEFAKAVVGLKTKLNLALGTEVDSSEATAWNFSLGQLDDKWAGIESAMTDEGTEILDQIRDLYRARLLNGIVPTGKTLSQAKVDDYTQHHEDLQLFKAYLKQLEDDGTAKAIRQLYDRYIDGDDAAPFLRENFVKALTKDVTAHPNTKSPELLERLAQPDFMLKQRNKANGAIPVQMQQRELDQIIKNQAVYYDWLAAPNPVEKHRKSMPYQLDELLNFRIPYYVGPLVTAKEQKAAQGGVFAWMVRKDPEGNITPYNFDEKVDREASANTFIQRMKTTDTYLIGEDVLPKQSLLYQRYEVLNELNNVRVNNEKLSIEQKQQVIRELFERHNSVTIKQFAENLRAHGDYAHIPEIRGLADEKRFLSSLSTYRQLKSLLPEAIDDPAKQADIENIIAWSTVFEDAAIFKTKLKEISWLGSEAITKLSNIRYRGWGQFSRKFLNGLTLGNGHTIIQELLLSTNNLMQILTDETLQKKMTELNADKLKTANINDAIDNAYTSPSNKKALRQVLRVVDDIKRAADGQDPSWLYVETADGGGTPGKRTRARQHQLQEIYANAAHELIDTAVRGELEDKISDKADFNDRLVLYFMQGGRDIYTGAPLNIDQLSSYDIDHILPQSLIKDNSLDNRVLVHAIINREKNATFASTIYAQKMNATWRQWHEAGLISGRKLRNLQMRPDQIDKYASGFVARQLVETRQIIKLTEQIVAAQYPDTKIIAVKAGLSHQLREELEFPKNRDVNHYHHAFDAFLAARIGTYLLKRFPNLQAFFTYGKFTKADVKKLRGFNFIRDITHAEDKIVAKDTGEVVWDKQRDVDELDRIYNFKRMLITHEVRFETADLFKQTVYGARDSKEAGGSKQLIPKKKDIQLIFMGAISERTRPILPL

SEQ ID NO: 1010 - protein, 1366 aa, Lactobacillus casei
MTKLGKPYGIGVDIGSNSIGFAAVDENSHLIRLKGKTVIGARLFEEGKAAAYRRASRTTRRRLSRNRWRLSFLRDFFESHITPTDPNFFMRQKYSEISPKDKARYKYEKRLFNDRTDAEFYQQYPTMYHLRTRLLTDPSKADVREIYFAIHHILKSRGHFLTPGYAKDFNTNKVALNEIFPALQDAYAQVYPDLDITFDENKVNEFKTVLLNEKATPSDTQRALVNLLLAKEGDRDILKQQKQVLTEFAKAVVGLKTKLNVALGTEVDSSEATAWNFSLGQLDDKWAGIESAMTDEGTEILDQIRDLYRARLLNGIVPAGKTLSQAKVDDYAQHHEDLELFKDYLKQLEDDGTAKAIRQLYDRYIDGDDAKPFVREDFVKALTKEVTAHPNAKSPELLERLAQPDFMLKQRNKANGAIPVQMQQRELDQIIKNQAVYYDWLAAPNPVEKHRQSMTYQLDELLNFRIPYYVGPLVTAKEQKAAQGGVFAWMVRKDPDGNITPYNFDEKVDREASANTFIQRMKTTDTYLIGEDVLPKQSLLYQSYEVLNELNNVRVNDNKLSFDQKQQVLGELFERHNTVTIKQFVDNLLAHGDYDRIPEVRGLADEKRFLSSLSTYNQLKGILHEAIDDADKQTDIENIIAWSTIFEDKAIFKTKLNEISWLNAGMINSLANIRYRGWGQFSHKLLNELTLSTGRTVFEELLISSRNLMQILTDEVLKQKIAELNAHELKASGIYAAIDDAYTSPSNKKALRQVLSVIDDITNAAGQAPNWLYIETADGDGVPGKRTNSRQRKIQEIYANAAQELITGSVRGEFEDKIASRADFTDRLVLYFMQGGRDIYTGEPLNIDNLSSYDIDHILPQSLIKDNSLDNRVLVHPLVNREKDTIFASTRFAKQMNGMWRQWHAAGLISSRKLRNLQMRPDEIDKYASGFVARQLVETRQIIKLTEQIVADQYPDTKIIAVKAGLSSQLRKELDFPKNREVNHYHHAFDAFLAARIGTYLLKRYPNLEPFFTYGKFKKTEVKKLKSLKSLKSFNFIRDMTHAKDKIVAKETGEIVWDNASDINELDRIYNFKRMLITHEVRFETASLFKQTLYAAKNSKNRGGSRQLIPKKKGYLVDIYGGYTQETGSYLSVVRLTKKAMYAVVKVSTRDAAKLAVAKSISEQKENETLKKIIDGKLSKTSKKGKTTHQLFEIVLPRVGQKTLFKNSKYNQFLVNSDTYMHNYQELWMPREYQRMWKDILLSNHGDAQIEGQLDQIFKFIVSQVNSYFNLYDINQFRKKIADATDKFAKLPTHDTDNARGKIATIGQLLIGLQANAMRSDLRNLDIKTPFGLLQIGTGITLDLDTSIIYQSPTGLFEREVPLTDL

SEQ ID NO: 1011 - protein, 1354 aa, Lactobacillus coryniformis
MTLHYNVGLDIGTNSVGYTIVDDNGKILQVKGKNGYGVRVFKEGATAAERRIFRTTHRRLKRRKWRLRLLQDFFEPYILPQDDGFFIRRKESNLVLNDRDEDTASLFNDRSDRDFYQAYPTIYHLRQALMTEKRQFDVREIYLAMHHIIKYRGHFLLNGTVNNFTNNKIDLHSDFEELNALLLNVIPELKFQIDLDHSTMFQTTLLNTTISRSGRQRDLVKSFYNGSDDKQLAKQQKSVATELLKAILGLKAKFHKLFNLDLLETTEWEFSFDAEDIDDKLAKLEPLMTENQQQVMDILQRIFAAITLNGIVPEGKTLSASKVDSYQKHKQDLKLLKAIAQHSDKKTATVLQTAYNEYINGIASKPLKQEDFYKRLTNAVKKSSDPQVADMLALIDQEKFLPKQRTKENGAIPHQLHQLELERIIDNQKDYYPWLAELNPNQARQKVAKYKLSELVAFRVPYYVGPLIEPEVQQATSNAHFAWMARKEAGPITPWNFDQKVDRNVSAERFIKRMTTKDTYLLAEDVLPLHSLLYQRFIVLNELNNVRVNGQKLTKKQKQAVYQDLFKRQPHVTKKQFKSYLVQTGEFAESSKIEGLANETSFNSGLTTENELRKIFGAQLDEARYQVDFEQIIEWATLFEDAKILRTKLAEITWLTTEQIEKLAGIRYRGWGRFSRKLLAGLRDQNGQQIIDLLWDTPNNFMVIVSQAAFSEAITKENEKLIDRRGAQDVITDLYTSPQNKKALRQVLAIVADVQKAMGGVPPQRIFIEFAREDEKNPRRSVERSRQLEKLYQTISNEFLINSEVRQELKEAVDQKVNFKDRLFLYFLQGGVDLYSGKRINIDQLSHYDIDHILPQSFIKDDSLDNRVLVSQKLNRSKSDSVPLSEFANYKFGPAMQAKWLQLKEAGLLSKRKYDNLTLDPTKLSKFAPLGFVNRQLVETRQVIKLAANLLASEETKVVTIKANMTHQVRKELDFPKNRNVNNYHHAFDAYLTAFVGIFLSKRYPKLKPYFTYGDFQKGNKLPDLKNFNFLYELKNKDRSIDSNTGEIIWDKQRDLAYMNKIYNFKKVTVVHEVLTKSGALYNQTLYKASEDKASGRGTKQLIRKKDNMPTELYGGYTGSTSAFMSIVRLWKKDKPYYKVVGIPTRMAAKLANQAQLLDYLTKKFTTRKLVKKTGDYKTTVERFELVVPKVGFNQLVIDGGQPFMLGSATYQYNARELFISKEAVKALNKQLSTHVDLVQVFDEILVQVNRWFPLYDTNGFREKLSHGRDRFMKLNDSFEEKSDTQIDVLNRILIGFHANAARTNLKILGLGTDLGFMTQQAGIRLTEKAILVHQSPSGLFERKVALRDLKGLR

SEQ ID NO: 1012 - protein, 544 aa, Lactobacillus crispatus
KYYLYFMQLGRDAYTGKPINIDEVSQYYDIDHILPQSFIKDDSLNNRVLVAKPINNGKSDGVPLKLFGDNLATGLGITVKQMWNNWADKGLINKAKQNNLFLDPENINKHQASGFIRKQLVETSQIIKLATTILQAEYPKTKIIVVKASSNHYLRNEFDLYKSREVNDYHHAIDAYLTTICGNLLYQAYPKLRPFFVYGQFKKFSSDPKKENEILKKTKNFDFVAKLLGSKAPNEIRSQQGKVLFEKNKIRLQLNKAYNYKYMLVSRDTTTKNQEMFGMTIYPRAERDIAKSRKLIEKRKGFSTDIYGGYTGTAAAYMAIVRINKTKSSQYKVIAVPMTKRAILNKAEKEGNYEKILKQILSPSILYNDKGKRKAGVISFDIIKGKVPYNQVVQDGNKKFLLKSAIYLCNAKQLVLSEEAMRVITGHWLDSDKQDQELLDVYDEILEKIDRYLPLFDIRDFRNKLHKGREKFLKLNAEDKFKAIIQILKGLHDNSDTGELKDIGITVPFGQLQNNSGITLSSDTILVYQSPTGLFEKRVKISSL

SEQ ID NO: 1013 - protein, 298 aa, Lactobacillus crispatus
MDELNKISVNGKKLSVSVKQELYEDLFKKNNTVSAKQLKNWLIENQKLPYIKIKGLADQTKFNSSLSTYIKLKKSGLFVDKLDSNEFRDDFEKIIEWSTIFEDKQIYIQKLQTIDWLTAKQIQFLQNIRLQGWGRLSKKLLTAIVDSNGQNIIEQLWNSQQIFMSIVNKADIKGTITDANQDLMHSNSMEDILSEAYTSPANKKMIRQVVKVVHDIQKAASGQAPKQIAIEFARESRRNSKLSQTRGHKLQDIYQKISGDIVNKNLKDKLAEYIKNNQLSVWEKTSFQMNKNDQDFLF

SEQ ID NO: 1014 - protein, 279 aa, Lactobacillus crispatus
MNGKKLSVSVKQELYEDLFKKNNTVSAKQLKNWLIENQKLPYIKIKGLADQTKFNSSLSTYIKLKKSGLFVDKLDSNEFRDDFEKIIEWSTIFEDKQIYIQKLQTIDWLTAKQIQFLQNIRLQGWGRLSKKLLTAIVDSNGQNIIEQLWNSQQIFMSIVNKADIKGTITDANQDLMHSNSMEDILSEAYTSPANKKMIRQVVKVVHDIQKAASGQAPKQIAIEFARESRRNSKLSQTRGHKLQDIYQKISGDIVNKNLKDKLAEYIKNNQLNKDKYYTR

SEQ ID NO: 1015 - protein, 538 aa, Lactobacillus crispatus
MQLGRDAYTGKPINIDEVSQYYDIDHILPQSFIKDDSLNNRVLVAKPINNGKSDGVPLKLFGDNLATGLGITVKQMWNNWADKGLINKAKQNNLFLDPENINKHQASGFIRKQLVETSQIIKLATTILQAEYPKTKIIVVKASSNHYLRNEFDLYKSREVNDYHHAIDAYLTTICGNLLYQAYPKLRPFFVYGQFKKFSSDPKKENEILKKTKNFDFVAKLLGSKAPNEIRSQQGKVLFEKNKIRLQLNKAYNYKYMLVSRDTTTKNQEMFGMTIYPRAERDIAKSRKLIEKRKGFSTDIYGGYTGTAAAYMAIVRINKTKSSQYKVIAVPMTKRAILNKAEKEGNYEKILKQILSPSILYNDKGKRKAGVISFDIIKGKVPYNQVVQDGNKKFLLKSAIYLCNAKQLVLSEEAMRVITGHWLDSDKQDQELLDVYDEILEKIDRYLPLFDIRDFRNKLHKGREKFLKLNAEDKFKAIIQILKGLHDNSDTGELKDIGITVPFGQLQNNSGITLSSDTILVYQSPTGLFEKRVKISSL

SEQ ID NO: 1016 - protein, 206 aa, Lactobacillus crispatus
MQLGRDAYTGKPINIDEVSQYYDIDHILPQSFIKDDSLNNRVLVAKPINNGKSDGVPLKLFGDNLATGLGITVKQMWNNWADKGLINKAKQNNLFLDPENINKHQASGFIRKQLVETSQIIKLATTILQAEYPKTKIIVVKASSNHYLRNEFDLYKSREVNDYHHAIDAYLTTICGNLLYQAYPKLRPFFVYGQFKKFSSDPKKRK

SEQ ID NO: 1017 - protein, 857 aa, Lactobacillus crispatus
MTKLNNEYMVGLDIGTNSCGWVATDFDNNILKMHGKRALGSHLFDEGVSAADRRAFRTTRRRIKRRKWRLKLLEEIFDEEMAKVDPNFFARLKESGLSPLDTRKNVSSIVFPTKKMDKQFYKKFPTIYHLRNALMKQDKKFDLRAIYIAIHHIVKYRGNFLSNSSISNFSASKIEIDRFVNELNDLYSIFLPESGVIFDAGNASKVEDIIRNEQMFKLDKIKEIADVLPDTENKSGLKLSKKISKEISKAILGYKAKFEIILQVNVDKTDSSIWNFKLNDENADVNLSEITSDLTDTQLQILDLVRNLFSAISLLNIVDEGSTLSESMIRKYNDHAQDLKLLKTVIKNHSDRKKAHNLQLAYDKYVNNRHFVDVETKKAFPNKHLYRKSDFYEIVKKNLDASKEAVQIRKEIALDKFMPKQRSDENGVIPFQLNQIELDKIIENQGKYYPFLKEINPIKAHRMQAPYKLDELIRFRVPYYVGPMIEPTNSSYPQTRQNQSFAWMVRKAKGRITPWNFDEKVDRQKSANNFIKRLTTKDTYLFGEDVLPANSLLYQKYTVLDELNKISVNGKKLSVSVKQELYEDLFKKNNTVSAKQLKNWLIENQKLPYIKIKGLADQTKFNSSLSTYIKLKKSGLFVDKLDSNEFRDDFEKIIEWSTIFEDKQIYIQKLQTIDWLTAKQIQFLQNIRLQGWGRLSKKLLTAIVDSNGQNIIEQLWNSQQIFMSIVNKADIKGTITDANQDLMHSNSMEDILSEAYTSPANKKMIRQVVKVVHDIQKAASGQAPKQIAIEFARESRRNSKLSQTRGHKLQDIYQKISGDIVNKNLKDKLAEYIKNNQLSVWEKTSFQMNKNDQDFLF

SEQ ID NO: 1018 - protein, 857 aa, Lactobacillus crispatus
MTKLNNEYMVGLDIGTNSCGWVATDFDNNILKMHGKRALGSHLFDEGVSAADRRAFRTTRRRIKRRKWRLKLLEEIFDEEMAKVDPNFFARLKESGLSPLDTRKNVSSIVFPTKKMDKQFYKKFPTIYHLRNALMKQDKKFDLRAIYIAIHHIVKYRGNFLSNSSISNFSASKIEIDRFVNELNDLYSIFLPESGVIFDAGNASKVEDIIRNEQMFKLDKIKEIADVLPDTENKSGLKLSKKISKEISKAILGYKAKFEIILQVNVDKTDSSIWNFKLNDENADVNLSEITSDLTDTQLQILDLVRNLFSAISLLNIVDEGSTLSESMIRKYNDHAQDLKLLKTVIKNHSDRKKAHNLQLAYDKYVNNRHFVDVETKKAFPNKHLYRKSDFYEIVKKNLDASKEAVQIRKEIALDKFMPKQRSDENGVIPFQLNQIELDKIIENQGKYYPFLKEINPIKAHRMQAPYKLDELIRFRVPYYVGPMIEPTNSSYPQTRQNQSFAWMVRKAKGRITPWNFDEKVDRQKSANNFIKRLTTKDTYLFGEDVLPANSLLYQKYTVLDELNKISVNGKKLSVSVKQELYEDLFKKNNTVSAKQLKNWLIENQKLPYIKIKGLADQTKFNSSLSTYIKLKKSGLFVDKLDSNEFRDDFEKIIEWSTIFEDKQIYIQKLQTIDWLTAKQIQFLQNIRLQGWGRLSKKLLTAIVDSNGQNIIEQLWNSQQIFMSIVNKADIKGTITDANQDLMHSNSMEDILSEAYTSPANKKMIRQVVKVVHDIQKAASGQAPKQIAIEFARESRRNSKLSQTRGHKLQDIYQKISGDIVNKNLKDKLAEYIKNNQLSVWEKNSFQMNKNDQDFLF

SEQ ID NO: 1019 - protein, 347 aa, Lactobacillus crispatus
MVNLKSLVLILKKENEILKKTKNFDFVAKLLGSKAPNEIRSQQGKVLFEKNKIRLQLNKAYNYKYMLVSRDTTTKNQEMFGMTIYPRAERDIAKSRKLIEKRKGFSTDIYGGYTGTAAAYMAIVRINKTKSSQYKVIAVPMTKRAILNKAEKEGNYEKILKQILSPSILYNDKGKRKAGVISFDIIKGKVPYNQVVQDGNKKFLLKSAIYLCNAKQLVLSEEAMRVITGHWLDSDKQDQELLDVYDEILEKIDRYLPLFDIRDFRNKLHKGREKFLKLNAEDKFKAIIQILKGLHDNSDTGELKDIGITVPFGQLQNNSGITLSSDTILVYQSPTGLFEKRVKISSL

SEQ ID NO: 1020 - protein, 534 aa, Lactobacillus crispatus
RDAYTDKPINIDEVSQYYDIDHILPQSFIKDDSLNNRVLVAKPINNGKSDGVPLKLFGDNLATGLGITVKQMWNNWADKGLINKAKQNNLFLDPENINKHQASGFIRKQLVETSQIIKLATTILQAEYPKTKIIVVKASSNHYLRNEFDLYKSREVNDYHHAIDAYLTTICGNLLYQAYPKLRPFFVYGQFKKFSSDPKKENEILKKTKNFDFVAKLLGSKAPNEIRSQQGKVLFEKNKIRLQLNKAYNYKYMLVSRDTTTKNQEMFGMTIYPRAERDIAKSRKLIEKRKGFSTDIYGGYTGTAAAYMAIVRINKTKSSQYKVIAVPMTKRAILNKAEKEGNYEKILKQILSPSILYNDKGKRKAGVISFDIIKGKVPYNQVVQDGNKKFLLKSAIYLCNAKQLVLSEEAMRVITGHWLDSDKQDQELLDVYDEILEKIDRYLPLFDIRDFRNKLHKGREKFLKLNAEDKFKAIIQILKGLHDNSDTGELKDIGITVPFGQLQNNSGITLSSDTILVYQSPTGLFEKRVKISSL

SEQ ID NO: 1021 - protein, 278 aa, Lactobacillus crispatus
SVNGKKLSVSVKQELYEDLFKKNNTVSAKQLKNWLIENQKLPYIKIKGLADQTKFNSSLSTYIKLKKSGLFVDKLDSNEFRDDFEKIIEWSTIFEDKQIYIQKLQTIDWLTAKQIQFLQNIRLQGWGRLSKKLLTAIVDSNGQNIIEQLWNSQQIFMSIVNKADIKGTITDANQDLMHSNSMEDILSEAYTSPANKKMIRQVVKVVHDIQKAASGQAPKQIAIEFARESRRNSKLSQTRGHKLQDIYQKISGDIVNKNLKDKLAEYIKNNQLNKDKYY

SEQ ID NO: 1022 - protein, 277 aa, Lactobacillus crispatus
SVNGKKLSVSVKQELYEDLFKKNNTVSAKQLKNWLIENQKLPYIKIKGLADQTKFNSSLSTYIKLKKSGLFVDKLDSNEFRDDFEKIIEWSTIFEDKQIYIQKLQTIDWLTAKQIQFLQNIRLQGWGRLSKKLLTAIVDSNGQNIIEQLWNSQQIFMSIVNKADIKGTITDANQDLMHSNSMEDILSEAYTSPANKKMIRQVVKVVHDIQKAASGQAPKQIAIEFARESRRNSKLSQTRGHKLQDIYQKISGDIVNKNLKDKLAEYIKNNQLNKDKY

SEQ ID NO: 1023 - protein, 1368 aa, Lactobacillus curvatus
MSRPYNIGLDIGTSSIGWSVVDDQSKLVSVRGKYGYGVRLYDEGQTAAERRSFRTTRRRLKRRKWRLGLLREIFEPYITPIDDTFFLRQKQSNLSPKDQRKLYTQTSLFNDRTDRAFYDDYPTIYHLRYRLMTEKRQFDIREIYLAMHHIVKYRGHFLNEAPVSSFKSSEINLVAHFDRLNTIFADLFSESGFQLETDKLAEVKALLLDNQQSASNRQRQALSLIYTPSTNKAVEKQNKAIATELLKAILGLKAKFNVLTGIEAEDVKAWTLTFNAENFDEEMVKLESSLDDNAHQIIESLQELYSGVLLAGIVPENQSLSQAMITKYDDHQKHLKMLKAVREALAPGDRQRLKQAYDQYVDGQENTKAYSKEDFYGDITKALKNNPDHPIVSEIKKLIELDQFMPKQRTKDNGAIPHQLHQQELDRIIENQQQYYPWLAELNPNSKRQTVAKYKLDELVAFRVPYYVGPLITAEQQRQSSDAKFAWLIRKAEGRITPWNFDDKVDRQASANEFIKRMTTTDTYLLAEDVLPKQSLIYQRFEVLNELNGLKIDDQPITTELKQAIFTDLFMQKISVTVKNIQDYLVSEKRYASRPAITGLSDENKFNSRLSTYHDLKMIVGDAVDDVDKQADLEKCIEWSTIFEDGKIYSAKLNEIDWLTDQQRVQLAAKRYRGWGRLSAKLLTQIVNANGQRIMDLLWDTTDNFMRIVHSEDFDKLITEANQMMLAENDVQDVINDLYTSPQNKKALRQILLVVNDIQKAMKGQAPERILIEFAREDEVNSRLSVQRKRQVEQVYQNISNELLNNTEIRNELKDLSNSALSNTRLFLYFMQGGRDMYTGDSLNIDRLSTYDIDHILPQSFIKDNSLDNRVLVSQKMNRSKADQVPTDFTSVELGQKMQIQWEQMLRAGLITKKKYDNLTLNPDHISKYAMKGFINRQLVETRQVIKLATNLLMEQYGEDNIELITVKSGLTHQMRTEFDFPKNRNLNNHHHAFDAYLTAFVGLYLLKRYPKLKPYFVYGEYQKASQQDKWRNFNFLNGLKKDELVDENTEAVIWDKESGLAYLNKIYQFKKILVTRGVHENSGALFNQTLYAAKDDKASGQGGKQLIPAKQDRSTALYGGYSGKTVAYMCIVRIKNKKGDLYKVCGVETSWLAQLKQLTDEDSQKAFLEQKISPQFTKVKKQKGNIIEAVEEFEVIAPHILINQRFFDNGQELTLGSATYKHNEQELILDKTAVKLLNGALPLTQSEELAEQVYDEILDQVMHYFPLYDTNQFRAKLSTGKAAFMKLPWKSQWDGNKMVQVGQQVILDRILIGLHANAAMSDLKVLKMTTPFGMIQQSTGITLSADTQIIYQSPTGLFERRVALRDL

SEQ ID NO: 1024 - protein, 669 aa, Lactobacillus delbrueckii
MAKPKDYTIGLDIGTNSVGWVVTDDQNNILRIKGKKAIGARLFTEGKVAAERRSFRTTRRRLSRRRWRIKMLEELFDEEIAKVDPSFFARLHESWISPKDKRKRYSAIVFPSPEEDKKFHESYPTIYHLRDKLMKDDQKHDIREIYIAVHQMIKARGNFLHDESVETYRSGMSSLGGRSERNILSVQTLEELNDLFAENEGTEEVELNVASAEQINDILTGGHLNADSQKEISNLLLPSSFPSFDDKAKEKQVKKLINNVATNISKAWLGYKADFSTILNLAKVDKDQKKIFAFALQGGDEEDKVQELESLLEQSQTDIVDRLIEIRHAIVLSEIVPVGMTLSEAMIDKYDQHKEDLITLKAVIRNTKDKKKAAKLQAIYDLYVKKRHADLAKAMKLTGIKKRSELLDPEELKKGISSLLDDSPEAVEIKQRLEEKTFLPLQRSNNNGVIPNQLHQVELDEIIKKQSKYYPFLAEKNPDESEEAQKKAPTKLDALLTFRVPYYVGPMITKEEQEAQNGHSFAWMVRRDPQDHEAITPWNFEKKVDKMASATQFIKRMTTKDTYLLGEDVLPASSLKYQLFTVLNELNNLRVNGKKLTSDEKEQVIEGLFKKQKTVKADKFVKYWQAKHIGADIKVKGLSDPSKFNSTMSTYIDFKKIFGDQLNDVNRQR

SEQ ID NO: 1025 - protein, 544 aa, Lactobacillus delbrueckii
MTGCADYDVDHIMPQSFVKDDSLDNRVLVARAVNNQKSDKVPALLFGNKVVADLGITVREMWDKWQKLGMISKRKLSNLLTDPDALTEYRAQGFIRRQLVETSQVIKLTATILQSEFPDSKIIEVPAKYNSIVRKQFDLYKSREVNDFHHAIDAYLSTIVGNYLYQVYPNLRRMFVYGEFKKFSSNAEESAHDVARRVKSMNFLDDLLRGTHGDNIYCRSTGEIVFNRNDIISKLKQAYSFKQMLVTQEVFTKKSALFDQTVYPSPERDSKKRSGLIPRKKGMDTEIYGGYSGNKDAYFVLAEAVKEKGHTLQIVGVPIRALNTLKNSANYSEKLLEIIKPQVMFNKDTGKPIKGIKDVKILMDKIPCRQPVLEGESYYMLASSKYRYSLKQISLSQMSMKYILDYIDDPNFNKHEMINIDQQDEKECLLSVYDEILEKMDKYLPLFDIRSFRKKLHDGRDAFIALPVASEEKKPGEVDVIRKILKGLHANADITNLAELGFGTAALGALVSTGGIKISDDAVFIYQSPTGLFERRVKVSDLLK

SEQ ID NO: 1026 - protein, 1356 aa, Lactobacillus farciminis
MTKKEQPYNIGLDIGTSSVGWAVTNDNYDLLNIKKKNLWGVRLFEEAQTAKETRLNRSTRRRYRRRKNRINWLNEIFSEELAKTDPSFLIRLQNSWVSKKDPDRKRDKYNLFIDGPYTDKEYYREFPTIFHLRKELILNKDKADIRLIYLALHNILKYRGNFTYEHQKFNISNLNNNLSKELIELNQQLIKYDISFPDDCDWNHISDILIGRGNATQKSSNILKDFTLDKETKKLLKEVINLILGNVAHLNTIFKTSLTKDEEKLNFSGKDIESKLDDLDSILDDDQFTVLDAANRIYSTITLNEILNGESYFSMAKVNQYENHAIDLCKLRDMWHTTKNEEAVEQSRQAYDDYINKPKYGTKELYTSLKKFLKVALPTNLAKEAEEKISKGTYLVKPRNSENGVVPYQLNKIEMEKIIDNQSQYYPFLKENKEKLLSILSFRIPYYVGPLQSAEKNPFAWMERKSNGHARPWNFDEIVDREKSSNKFIRRMTVTDSYLVGEPVLPKNSLIYQRYEVLNELNNIRITENLKTNPIGSRLTVETKQRIYNELFKKYKKVTVKKLTKWLIAQGYYKNPILIGLSQKDEFNSTLTTYLDMKKIFGSSFMEDNKNYDQIEELIEWLTIFEDKQILNEKLHSSKYSYTPDQIKKISNMRYKGWGRLSKKILMDITTETNTPQLLQLSNYSILDLMWATNNNFISIMSNDKYDFKNYIENHNLNKNEDQNISDLVNDIHVSPALKRGITQSIKIVQEIVKFMGHAPKHIFIEVTRETKKSEITTSREKRIKRLQSKLLNKANDFKPQLREYLVPNKKIQEELKKHKNDLSSERIMLYFLQNGKSLYSEESLNINKLSDYQVDHILPRTYIPDDSLENKALVLAKENQRKADDLLLNSNVIDRNLERWTYMLNNNMIGLKKFKNLTRRVITDKDKLGFIHRQLVQTSQMVKGVANILDNMYKNQGTTCIQARANLSTAFRKALSGQDDTYHFKHPELVKNRNVNDFHHAQDAYLASFLGTYRLRRFPTNEMLLMNGEYNKFYGQVKELYSKKKKLPDSRKNGFIISPLVNGTTQYDRNTGEIIWNVGFRDKILKIFNYHQCNVTRKTEIKTGQFYDQTIYSPKNPKYKKLIAQKKDMDPNIYGGFSGDNKSSITIVKIDNNKIKPVAIPIRLINDLKDKKTLQNWLEENVKHKKSIQIIKNNVPIGQIIYSKKVGLLSLNSDREVANRQQLILPPEHSALLRLLQIPDEDLDQILAFYDKNILVEILQELITKMKKFYPFYKGEREFLIANIENFNQATTSEKVNSLEELITLLHANSTSAHLIFNNIEKKAFGRKTHGLTLNNTDFIYQSVTGLYETRIHIE

SEQ ID NO: 1027 - protein, 1313 aa, Lactobacillus fermentum
MHYLDEIFAPHLQEVDENFLRRLKQSNIHPEDPAKNQAFIGKLLFPDLLKKNERGYPTLIKMRDELPVEQRAHYPVTNIYKLREAMINEDRQFDLREVYLAVHHIMKYRGHFLNNASVDKFKVGRIDFYKSFNVLNEAYEELQNGEGSFTIEPSKVEKIGQLLLDTKMRKLNRQKAVAKLLEVKVADKEETKRNKQIATAMSKLVLGYKADFATVAMANGNEWKIDLSSETSEDEIEKFREELSDAQNDILTEITSLFSQIMLNEIVPNGMSISESMMDRYWTHERQLAEVKEYLATQPASARKEFDQVYNKYIGQAPKERGFDLEKGLKKILSKKENWKEIDELLKAGDFLPKQRTSANGVIPHQMHQQELDRIIEKQAKYYPWLATENPATGERDRHQAKYELDQLVSFRIPYYVGPLVTPEVQKATSGAKFAWAKRKEDGEITPWNLWDKIDRAESAEAFIKRMTVKDTYLLNEDVLPANSLLYQKYNVLNELNNVRVNGRRLSVGIKQDIYTELFKKKKTVKVSDVASLVMAKTRGVNKPSVEGLSDPKKFNSNLATYLDLKSIVGDKVDDNRYQTDLENIIEWRSVFEDGEIFADKLTEVEWLTDQQRSALVKKRYKGWGRLSKKLLTGIVDENGQRIIDLMWNTDQNFMQIVNQPVFKEQIDQLNQKAITNDGMTLREWVESVLDGAYTSPQNKKAIWQVVRVVEDIVKAVGNAPKSISIEFARNEGNKGEITRSRRTQLQKLFEDQAHELVKDTSLTEELEKAPDLSDRYYLYFTQGGKDMYTGDPINFDEISTKYDIDHILPQSFVKDDSLDNRVLVSRAENNKKSDRVPAKLYAAKMKPYWNQLLKQGLITQRKFENLTMDVDQNIKYRSLGFVKRQLVETRQVIKLTANILGSMYQEAGTDIIETRAGLTKQLREEFDLPKVREVNDYHHAVDAYLTTFAGQYLNRRYPKLRSFFVYGEYMKFKHGSDLKLRNFNFFHELMEGDKSQGKVVDQQTGELITTRDEVAKSFDRLLNMKYMLVSKEVHDRSDQLYGATIVTAKESGKLTSPIEIKKKRPVDLYGAYTNGTSAFMTIIKFTGNKPKYKVIGVPTTSAVGLKRVGKPGSESYNQELHRIIKSNPKVKKDFEIVVPHVSYSQLIVDDDCKFTLASDTYQHPATQLVLSKESMEIIADDFKFVKENTATADEQLVRVFDEIVNQMNHYFTIFDQRSNRQKVTKARDKFVSLPTESEYEGAKKTQVGKTEVITNLLMGLHANSAQGDLKVLGLSTFGFFQSSGGLNLSEDAMIVYQSPTGLFERRICLKDI

SEQ ID NO: 1028 - protein, 1327 aa, Lactobacillus florum
MTEQQQPYNIGLDIGTSSIGWAVTDQNDKLLHIRGHNGIGVRLFKEGESAAERRGFRTTRRRLSRRRWRLRFLDRIFDAELAKVDPNFLARLKQSNISPLDPNKQMFGNILFDDPQFDDQKFHQQYPTIYHLRSALAQPDAPQADVRLIYLALHHMIKFRGHFLNGAAVEKFHGGQLHLESEFQELNQIFSNQQRDHVQLQTSSLDEVATILKDNQRTPSDRQRELSARLFVPVDKTIDKENKKLATELLKAVLGLKAKFDVILGVEATDPQAFKLQFSSDDFDDKIAELASELTDEANEILTVLQRLYFSLNLADILTNRQTKQVADSISTAMINRYDDHKHHLKMLKELEAQVTQEQRDGLKKAYDEYIDGDKPTIDTFYTNIKKNLDDSELANQIKSLIDLQAFMPKQRSKENGSIPHQLHQRELDQLIEVQGKYYPWLLAAKDKLDALIAFRVPYYVGPMIDPNQSDDPQNTKFAWMVRKEAGEITPWNFEEKVDKTSSATNFIKRMTTTDTYLLGEPVLPKNSLLYQQFTVLNELNKLKVNGKALTVDQKKYLYEHVCKKQRRVTLKKLSDCLMARGDFPMGAIFTGTTDQKNMNNTLKTYQDFQEIFGDEIDNPDRQVDFEKMIEWSAIFEDREIFKLKLAELNWLTSEQLERVSKKRYQGWGRLSQKLLTHIVNENGERIIDQLWNTNQNFMEIMGQDSVKQAIQEHNGANVAQTGINETIDELYTSPQNKKAIRQILLVVDDIKKAVGYAPANIMMEFAREDRDDHRLIASRARQLEKTYQEISKNWFDNESVTQELKDQIKNKTKFTDRLYLYFIQGGIDLYTGHPLNIDQLSSYDIDHILPQSFLLDNSLNNRVLTSQAENRVHKEDRLPGETVANKMRPTWKMMREQGLMTQRKYNNLTLKPDQISKFNNRGQFINRQLVETRQVIKLAADIMSQKYQADQTKVVTVKANLTHHMREKFNFYKSRNVNDYHHAFDAYLTLFVGNWLLKEYPKLQPYFVYGDFAKTGTNNLKSFNFLYRFERDHKLNDKGAIDTDKDQQLGYMKRIYRFKKMLVTKQLETNEGALYGQTLYPAPKNDKKTRNLINSKKNRPSDIYGGYSNENGSFLTLVKLKKGSKYDYRLVAVPVSKISEIKESELATIEKAIAPQFLKSSGKYRDFQVVLSKILINQKVIDDGMIFTIGSKSYKHNAKQVVLSDNSIQIVSTLSRISDKEKLITVFDEIVDITSKYLPWYKVNDVEKTKMLFRQMQDIDEMKKIIDNSLIGLHCNASITDLGKVGLSKYWGRFVLTAGISLTVDAQLIYQSPTGLFEHRVKVSDL

SEQ ID NO: 1029 - protein, 1386 aa, Lactobacillus hominis
MTKITEDYIVGLDIGTNSCGWVAMDSKNTILRMHGKTAIGSHLFDAGNSAADRRAFRTTRRRIKRRKWRLKLLEEIFDSHLAKVDPYFFARLKESGLSPLDTRKNVSSIIYPTSLEDKKFYVDNPTIYHLRYKLMTEDRKFDLREVYLAIHHIVKYRGNFLYNTPVKAFEASKIDVKGSLKKLNELYEGLDSEFNVELDSNNALEIENIIRDKKIFKINKVKEINQLLSLKTEDKERTKLMKDVSKQIVNAILGYKTKFETILLKDVSKDEADDWEFKLTDVDADNKFENLIGDLNENEQEILLVIRKLANAITLSNIVEEGKTLSESMKDKYKKHSDDLKLLKQVISDHPDRDKAKKLALAYDLYVNNRHGKILQAKDILEKKKTLSKEDFYKEIKKNLDDSKESQEILDAISLDSFMPKQRTNENGVIPYQLHQLELDKIIENQGKYYPFLKEVNPVSSHLKQAPYKLDELIRFRVPYYVGPLISPNESTKNKQTKKNQNFAWMIRKEQGQITPWNFDQKVDRMASANKFIKRMTTIDTYLLGEDVLPANSLLYQKFTVLNELNNVKINGKRISVPLKQELYNNLFKKNSTVTTNKLKSYLKENYKLIKVEIKGLSDEKKFNSGLTTYNKLKNLKIFDQQIDDPNYNKDFERIIEWSTIFEDKAIYKEKLKTIDWLSDRQIDKLSKIRMQGWGQLSKKLLSQLTDNNGQTIIEQLWDSQNNFMQIVNQADFKDAIAVANQNLLVDTSVEDILNEAYTSPANKKAIRQVVKVVDDIVKATSGKVPKQIAIEFTRDADDNAKISQSRANKLRKVYKEMSNELASETIRNELERVAKDQKLLKDKHYLYFMQLGRDAYTGELIDIDNLEQYDIDHVLPQSFIKDDSLENRVLVKKAVNNGKSDNVPVKLYGNRMATDLGMTIRHMWEKWKEQGLITKTKYNNLIIDPDKINKYESSGFIHRQLVETSQIIKLVSTILQSKYPDTEIIVVKARYNHYLRKRLNLYKSREVNDYHHAIDAYLSAICGNLLYQVYPYLRPFFVYGQYKKFSSEPEKEKIIYDKTRRYNFISQIFENKDNDIISRETKKKVFDKKDIIEKLKRAYNYKYMLVSRETETHDQEMFKMTVYPRLSRDTKKSRNLIPKKKDMPTEIYGGYTNNSDAYMIIARINKKKGPEYRVFGVPMRELVNLRKAEKNGHYKAYLKQVLEPEIMYSKNGKKNKTISSFEIVKAKVPYKQVILDGDKKFMLASSTYVQNAKQLTLSQYSMQAITDNCENDTEEEKALVEAYDEILTNIDKYLPLFDINKFREKLHAGREKFVDLPLAEKKETILQVLNGLHDNAVMPKIKSLGLSTPLGFMQFHTGVSLSENAKLIYQSPTGLFEKRLKISDL

SEQ ID NO: 1030 - protein, 270 aa, Lactobacillus iners
MITYLKDNDDITLSFPKDQLINIFKNSNLNSTEKSDQLKPFFGRTNLEKGIIKLLSGGKQDLSNMFRDETLKNSNYKNLKFSDNRFDDERDGYAADLGDRIDLLILLKQIYDASILESMMSQARVSIDGHKYISSAKVCAYEKHKSDLKRLKSLIKKYLPSEYNNIFRKITEKDNYVAYSKSNITNNKREKALKYVKYVDFTKYLTKKLKTIKTQDAEDDQEIFEIKGELEKQSFLPKQRTLDNSIIPYQLHLMELKKYLIINLNIMTFC

SEQ ID NO: 1031 - protein, 255 aa, Lactobacillus iners
MITYLKDNDDITLSFPKDQLINIFKNSNLNSTEKSDQLKPFFGRTNLEKGIIKLLSGGKQDLSNMFRDETLKNSNYKNLKFSDNTFDDERDGYAADLGDRINLLILLKQIYDASILESMMSQARVSIDGHKYISSAKVCAYEKHKSDLKRLKSLIKKYLPSEYNNIFRKITEKDNYVAYSKSNITNNKREKALKYVEYVDFTKYLTKKLKTIKTQDAEDDKEIFEIKGELEKQSFLPKQRTLDNSIIPYQLHLME

SEQ ID NO: 1032 - protein, 343 aa, Lactobacillus iners
MLAKDDQEGITVKDKIISLLTFRLPYYIGPVNPAVHGKFAWVKRLANGKVTPWNYKEKIDIDASHEEFIKTKLSKCSFLIGCDVLPKNSLLYQKYMVLSELNTIKFNGVNISEKLKDDIYQNLFKNIQKVTKKRLQNYIKEHENIIGDVIVTGIDNAFKQGLVSYLKFKKIIGDKIDDDRYQKVLEKIIRDITLYDECAGKKIKKEYKDSDLFTEDELNKIVKLTFNDWGRLSAELLDQLEGEDTVSGETGKIIEFMQKHNYNLMQLMSKKFTFKYKIDEINKSYYQHDKFNYKSMIDSLYVSPATKRILWQSLKVVHEISKIMKHDPEKIFYRNGTFQRRSS

SEQ ID NO: 1033 - protein, 447 aa, Lactobacillus iners
MLYDHKLIGDKKYARLIRSKAFTDDELAGFIARQLVETRQATKETADLLKRLCPKSRIVYAKAQNASIFRQKFDIPKSRTINDLHHAQDAYLNIVVGNIFDTKFTQDPRNFIKNTKDSRNYNLEKIYDYNVERNNYVAWIAPDSKTNGTIANVKCNLSTKDFRVTRPSFYKKGALFNQNLSRKGSNLAPIKEHSPKSNPLKYGGYSGKNNSFFVVVAGKDNKGKDIVKLIPVNTLIYNKMLHCDYKAKQELLTSYVANNFAINNFRIVKDDIKMYSLVKIDGAYYYLVGGTDERIEVKNAMQLLLSKDSIKAVKILEKESKDQFANIKNYKDIDIKLGRTFNEVISKYTNSVFGKSMLISDKYRKDIFKSVDKSILEFNSLNTIAKADNLLKFVTSMRPAGSVDALKMVGLIERIRKSNVISNFNEFKLINQSVTGLFENEEDLLKL

SEQ ID NO: 1034 - protein, 667 aa, Lactobacillus iners
MQKHNYNLMQLMSKKFTFKSKIDEINKSYYQHDKFNYKSMIDSLYVSPATKRILWQSLKVVHEISKIMKHDPEKIFIEMARSKEDHPKRKLSRKADLKQVYKDSKKQIISIIGKDKYQDLSNELDNKDDRDLRWDNLYLYYTQLGRSMYSLKPIDISELMNKNLYDQDHIFPKSKKYDDSIENRVLVEKELNVKKSDIYPISDANIIPQKIKGQVESFWKMLYDHKLIGDKKYARLIRSKAFTDDELAGFIARQLVETRQATKETADLLKRLCPKSRIVYAKAQNASIFRQKFDIPKSRTINDLHHAQDAYLNIVVGNIFDTKFTQDPRNFIKNTKDSRNYNLEKIYDYNVERNNYVAWIAPDGETNGTIANVKCNLSTKDFRVTRPSFYKKGALFNQNLSRKGSNLAPIKEHSPKSNPLKYGGYSGKNNSFFVVVAGKDNKGKDIVKLIPVNTLIYNKMLHCDYKAKQELLTSYVANNFAINNFRIVKDDIKMYSLVKIDGAYYYLVGGTDERIEVKNAMQLLLSKDSIKAVKILEKESKDQFANIKNYKDIDIKLGRTFNEVVSKYTNSVFGKSMLISDKYRKDIFKSVEKSILEFNHLDTIGKADNLLKFVTLMRPSGSAHSLKMVGLIERIRKSNVISNFNEFKLINQSVTGLFENEEDLLKL

SEQ ID NO: 1035 - protein, 1395 aa, Lactobacillus jensenii; identical to SEQ ID NO: 113

SEQ ID NO: 1036 - protein, 1382 aa, Lactobacillus mucosae
MDIGTNSIGWTAIDDHFSLLRVKGKNAIGVRTFKEGETAADRRGFRTARRRLSRRRWRLQFLDEFFAPYLAEVDPNFLARLKQSDISAKDPAKNQEYMGKLLFPDQEAASDGNGYPTLIQMRKAMPAEKAADFPVFNIYQLRYALMNEKRKFDLREIYLAVHHIVKYRGNFLNNTSVDKFKADQIDFNKSFETLNDLFRQVQPIAPFQIDLTKVDELGKLLLDTKQKKLDRQKAVAKLLPLIEDGTDKEIVKAHQQTAREISKLILGYKAKVGLILQNNLDQTLDMSTENSDDQLMQIAEELDDYQMELINQLSLLYSQIMLNEIVPNGETVSASMLNRYYKHRCQLKELKDYGAAQDKKTREQLDHLYAEYIGQIPKDSKFDFTKDLKKLMDKSDLGQKIKDEIEAGDYLPKQRTSANGVIPHQMHQQELDQIIENQKEYYPWLAEPNPVEKNIKNAKYKLDQLVSFRVPYYVGPMITLADQQKTSKASFAWAVRKKAGKITPWNFYDMIDREKSANNFIKRMTNKDTYLLSEDVLPASSLLYQKFTVLNELNNIRVNGRKLQPALKQAIYTDLFQKRKTVNLKTLTNFLAIHEPTLTKPKIEGLSNGRSFNSSLGTYIDMSKILGDSLDDLNYRDDIEKIIEWSTVFEDSEIYGVKLQEIQWLTNEQREKLVRKRYQGWGRLSKKLLTGITDENGQRIIDLMWDTSKNFMQIVHQPVFEEQIAELNQQLLQDADKAPLEVVDDILADAYTSPQNKKAIRQVVKVVADVVKAVGNAPASISIEFARNEDRNKELKNSRRHSIEKLYHETAEKLVKQTNLLEELGNVKDLNDRYYLYFTQAGRDMYDGTPINIDEISTHYEIDHILPQSFLKDNSLDNRVLVKKSENAAKSDRVPAKLYGAKMRAFWKQLKESQLISNRKYLNLTTDPEQVDKYQMQGFVHRQLVETRQIIKLAANIFGSLYPDSAVIETRAELTKQLREKFSLYKVRDVNDYHHAVDAYLTAFAGHYLYQRYPKLRPMFVYGDYAKIYADDLKRLRSVNLFHDLEKDQYNSGTAVNPETKEKIVDVDWLSDYVSKIQHFKYMLISKAVYTQHGQLYGATILPVAQVDKISAPIGIKDDKPVDIYGAYTNEVAAYMAIVRVNGKKPKYKVVSVPVRMLQRLKMAEQKGHDQYMQTLHDVLLRNFTSLKKNRKTGLKEAVVKDFDVLVPCVRYNQLVIDGDTKFTLGSATYQHNAKQLVLCNHSLETLANNFEYVRKHPDEADERMIMLYDDILDQVNHYFTLYDKNKFREKLNAGRDKYLKLPTFSQFENNKKTAIGKSEAIINILRGLHANAAITNLKCLGVSTPFGQLQSPSGIELSENAKLVYQSPTGLFSREVLLKDL

SEQ ID NO: 1037 - protein, 1382 aa, Lactobacillus pentosus
MKKIVNYNLGLDIGTSSIGYAAIDDQGRPVRHQNKTVMGVRLFKEGKTAESTRIFRGTRRRLSHRHWRLGYLDRIFDNEIAKVDENFLPRLKASKRARSDEKRSFRGSLLFPETGDDAYYQKYPTIYHLRYALITQKKQFDIRLIYLALHHMIKYRGNFLDTTPVSAFNIHDIDLTDQFASLNDCYQLLDMDFEFQFDLNNIEQVQKLLLDETLSKTKRQAAVSKVLVMSTGNKAFDDQQNGIASEFIKALLGGPFDLSKILNLSVADVKSWKLHMTDKDVDDTLNSLVEELDENHKQIVNLLQMIYSQVMMLGLLNGQQSISASMIERYDDHAKHWAALKKLLPALGEQEQSTIIHAYTAYTGHSRTKQLSRAEFYTKVNSILKKHENIAEATGLIELIDRNEFMPKQRDAVNGVIPHQLHQRELQLIIQNQQKYYPFLAAKAYPDADETMIEQLLSFRVPYYAGPLVDRDFINESSDQEQAMQNTKFSWLKRREAGEITPWNFEQKVDVQETANRFIKRLTTKDTYLMTEDVLPKESLIYQRFEVLNELNAIRINDRRLTAENKQLAFQQLFMAGNTKNVSIKKFRNFVFDSLKFPEKVKITGFAGQHNFLAKLSTYHDFKKIFGERVDHTDLQPDFERIVEWCTIFEDRHIYREKLKEIQWLSQSEIDQLVLIRNHGWGRLSKRLLTGIRDSDGRTVMDQLWFGTDNFMRIISQSDFAAAIANENRTQLNQHGLEDVLDSAFMSPQNKKAIRQVLKVVDDIEQTLGCPPKKVMIEFTRSPDKKKQRTVTRLEKVQQAYKAVADQLAGQSIVSELDQYANTHSKLSDTYYLYFMQLGRDLYSGKPIDIDSPMLDDDHILPRAFMKDNSLDNRALTEKPINNTKAAKFPSKVFGQQKEVTDFWKLLRRCGLMSNIKEKHLYLDPDNVDKWTRRGFIHRQLVETSQVIKIVANILNDRYQQSQTEVLEVPARLGTELRECFGWYKVREVNDYHHVFDAYLAAFIGNYLYRRYPKLQPYFVYGNFAELNKAQLKNIKSFNFLYNITDNKRVVKDIETGQTLWDDQIRQQIQHIYEYKYMLTSHEAFTQHKELYGQTIYPRREFKPGTLKAIKQDQPQELYGGYKNLTAAYMCIVKIQARKRRAAEYRVVRVATESLSALQQAKRLGVQAYERCLRQELVRNNEILRTNADPNSAPREFEVLLDRVLCHQMIISDGQKYLLGSHAYKINCMQLVLSNNSMKILSTSIVKLKQMTNEPLVQVYREILDVVNKYFTLYDVNSFRENLNQFFDKFRTLPITNEYESSKSGKKLIHRGQLETLTLILRGLHANSDKVQYGDQSTLLGGFQTKDGIKLSKDSVIQYTSPAGLNVRTVKLRDLEQKEAQK

SEQ ID NO: 1038 - protein, 1361 aa, Lactobacillus pentosus
MNEPYGVGLDIGTNSVGWTVVDMNGRVRKVKGKTALGARLFKEGATAEDRRGFRTTRRRLKRVKWRLRLLREFFDQPISKIDPNFFARRKYSDISPRDPNYNGLAKTLFNDRTDKEFYDDYATIYHLRDKLMTSNRKFDIREIYLAIHHIVKYRGNFLRTGPASQYGSASLHLATSFQKLNDLFAQSEETLNLKLVTDEALLQQIQQILVRTDLSRSEQQRQIWPLMAVLTGASAAEKKRQKNVVVELSKALVGLKAKMNVVTLTEVDAAVVKDWTFTMEESQDKLPEIEEQLSEVGQQIMDEVIQLYASVNLAQLIPAGKRFSQHMVEKYKHHEKNLELLKAYIHSQSDSKRGREIRATYDRYIDGVDSKPVTQEMFYKDLMKYVEADATSNHLAAEIKDEIDSEQFMPKLRTKQNGSIPYQVQQYELDQIISHQKKYYPWLGEENPVAERRGKFPYKLDELVGFRVPYYVGPLITKEDQQATSGAGFAWMVRKADGPITPWNFDQKVDRIASATAFIQRMQTTDTYLIGEDVLPARSLIYQRFMVLNELNNMRVEDRKLAPQQKQRLYNQVFKQHQHVSVKNIQQNLMDAGEYRKTPQITGLADPKGFNSSLSTYHDFKKILLEAIADEHKRADIEKIILWSTTFEDSAIFKQKLEEVAWLTDAQRKQLSGLRYRGWGQLSHKLLTAFKDDKGRSIMDGLWETSDNFMQLRKQPAIETQIKEANQANLTDADIQDTINELYTSPQNKKAIREVMLVLDDIKNAMHGQTPSWIFVEAARGGGVAGRRTQSRSSQIVEAYKGTAKEIVSEKVQHELNEKIKAKADFNTRLVLYFLQNGRDLYTNEAINIDRLSEYDIDHILPQSLVKDDSLDNRVLTSARINREKNDTFASEKFGRKMGAQWRELHRNGLMTQRKLKHLLMRPDEISKHATDFINRQLVETRQVIKLVEELISSEYPAASIVAVKANLTHQFRQTFNFPKLREVNDYHHAFDASLTAFIGMYLLKQYPKLERFFVYGKFAKQPINLTRFNIIRKLAVAEKPIANIETGEILWDKTADIKYFEKLYNYKRLLVTHEVRENYGAMFKQTLFKASYNKSKTLVPKKNHMETSVYGGYSNQETAYLAIVRIPFKSGFKFIVVGIPTRMVAKIKHYQSLGATLNQATHKVIEPKFTKISRKTKQTVISDYEVVLPKVYLDQVVRDQVKGQMYRFSLGSDKEYHNVQELYLPLSIQQAFVGHYDESDDQRSNDLVKVYDAALKQLQRYFPLHLSRNFDQVASQAHQSFEGLKNNVQTSDKQLGKKEVLNSLFVGLHANATRSNLSVLGMSKDFGRIKSNGITLTDQAEIIYQSPTGLFERKVALKDL

SEQ ID NO: 1039 - protein, 1358 aa, Lactobacillus pentosus
MNEPYGVGLDIGTNSVGWTVVDMNGRVRKVKGKTALGARLFKEGATAEDRRGFRTTRRRLKRVKWRLRLLREFFDQPISKIDPNFFARRKYSDISPRDPNYNGLAKTLFNDRTDQEFYHDYPTIYHLRDKLMTSDRKFDIREIYLAIHHIVKYRGNFLRTGPASQYGSASLHLATSFQKLNDLFAQSEESLNFKLVTDEAQLQQIQQILVRTDLSRSEQQRQIWPLMVVLMGATAAEKKRQKDFAKELANALVGLKAKLNVVTLTNVDTTVVKDWTFTLEESQDKLPEIEEQLSEVGQQIMDEVIQLYASVNLAQLIPAGKRFSQHMVEKYNHHEKNLELLKAYIHSQSDSKRGREIRATYDRYIDGVKSKPVTQEMFYKDLMKYVEADATSNHLAAEIKDEIDSEQFMPKLRTKQNGSIPYQVQQYELDQIISHQKKYYPWLGEENPVAERRGKFPYKLDELVGFRVPYYVGPLITKEDQQATSGAGFAWMVRKADGPITPWNFDQKVDRIASATAFIQRMQTTDTYLIGEDVLPARSLIYQRFMVLNELNNMRVEDQKLAPRQKQRLYNQVFKQHQHVSVKNIQQNLMDAGEYRETPKITGLADPKGFNSSLSTYHDFKKILPEAIADEHKRADIEKIILWSTTFEDSAIFKQKLEEVAWLTDAQRKQLSGLRYRGWGQLSHKLLTAFKDDNGRSVMDGLWETSDNFMQLRKQPAIETQIKEANQANLTDADIQDTINELYTSPQNKKAIREVMLVLDDIKNAMHGQTPSWIFIEAARGGGVAGRRTQSRSKQIVEAYKSTAKEIVSEKVQHELNEKIKAKADFNTRLVLYFLQNGRDLYTNEAINIDRLSEYDIDHILPQSLVKDDSLDNRVLTSARINREKNDTFASEKFGRKMGAQWRELHRNGLMTQRKLKHLLMRPDEISKHATDFINRQLVETRQVIKLVEELISSEYPSASIVAVKANLTHQFRQTFNFPKLREVNDYHHAFDASLTAFIGMYLLKQYPKLERFFVYGKFAKQPINLTRFNVIRKLAVAEEPIANIETGEILWDKTADIKCFEKLYNYKRLLVTHEVRENYGAMFDQTIFKATDSRKRLIQKKKGFATETYGGYTGRTLAYLAIVKVVTNKDTQYQVVGIPTTMVTQIQQLEASGLTSKQAVTKAIGAMINENNKKLQSYEVLLPKVRFEQVVRDEVKGHIHRFALGTDTYYHNIQELYLPLTIQRAFLGKRNDTDAQTEQNLLTVFETTLAQVNRYFPLYEMNKFKQILNSAQEKFAALPTKNKTVKNKLVTGKDGVLNNLFIGLHANASLGDLKILGMKIGFGKLQVPGGLKLTDQAEIIYQSPTGLFERKVALKDL

SEQ ID NO: 1040 - protein, 1358 aa, Lactobacillus plantarum
MKEPYGVGLDIGTNSVGWTVVDASGHVRKIKGQTGIGVRLFKEGAAAADRRGFRTTRRRLKRVKWRLRLLREFFDQPISKVDINFFARRKYSDVSPRDPNYNGLEKTLFNDRSDQDFYHDYPTIYHLREALMTQHRKFDVREIYLAIHHIVKYRGNFLRNDAATAYRSGTLDLQQHFETLNHLFSQADLELNLNLTTDVALLDSIKQTLVRTDISRSDRQKLIMPLLAVLTGATTAEKKRQKAVVTEFAKALVGNKTKIDVLTLTDIDATEAKDWAFSLEENQDKLPGIEDRFSEVGQQIIDEVIRLYASVNLAQLIPEGKRFSQSMVEKYKRHGEDLKLLKAYIRSQSDAKRGRAIRATYDQYIDGVKSKQVTQEAFQKALGKFVDADVDLNSWAAQIKQAIDSEQFMPKLRTKQNGAIPYQVQQNELDQIISNQKEYYPWLGEENPVIKRRGKFPYKLDELFGFRVPYYVGPLITKEMQAATANAGFAWMVRKADGPITPWNFDDKVDRVASATAFIQRMQTTDTYLIGEEVLPARSLIYQRFMVLNELNNIRVDDGQLTPRQKQRLYNQVFKKHKRVTAKNIQDNLVAAREFPTAPRITGLADPKVFNSSLSTYHDLKQVLPEAMSDVRKQADIEKIILWSTIFEDSTIFKQKLTEISWLTAAQLKQLGQLRYRGWGQLLRKLLTGLKDDNNRSIMDGLWETNANFMQLRSQPAIENQIKSANQANLTTADLQDTINELYTSPQNKKAIREVMVVLADIKDAMHGQTPNWIFVEAARGGGVAGRRTQSRSKQIVAAYQGTAQAIVRDQVQRELKEKIKNKANFNTRLVLYFLQNGRDLYTGDAINIDRLSEYDIDHILPQSLVKDDSLDNRVLTNARINREKNDTFASEKFGKKMGAKWKEMHRMGLMTKRKLDHLLMRPDEISKYATGFINRQLVETRQVIKLVEELINAEYPSTAIVSVKANLTHQFRQTFDFPKIREVNDYHHAFDAALTAFIGTYLLKRYPKLERFFVYGKFAKQPVNLTRFNVIRKLAKTDTPITDIDTGEVLWDKLTDIKYFETLYDYKRLLVTREVSENYGAMFDQTLLKASDNGKRLIRKKQSFDTAIYGGYTGKTLAYMAIVKVSTKKDVQYQVVGVPTTMVTQIEQLEQQGMTNKQAVTKVIEPLIAANNKKMLTYEVLLPKVRFEQVVRDRIKGQTHRFALGTDTYYHNIQELYLPLTLQRAFLGKQNESEVQLNQNLLTVFDATLAQVNRYFPLYEMNKFKKILNSARDQIELLEAKNQFVKNKLVLGKQGILTNMFIGLHANASYGDLKVLGVKIDFGKLQVPGGIKLTGDAEIIYQSPTGLFERKIALKDL

SEQ ID NO: 1041 - protein, 1361 aa, Lactobacillus rhamnosus
MTKLNQPYGIGLDIGSNSIGFAVVDANSHLLRLKGETAIGARLFREGQSAAERRESRTTRRRLSRTRWRLSFLRDFFAPHITKIDPDFFLRQKYSEISPKDKDRFKYEKRLFNDRTDAEFYEDYPSMYHLRLHLMTHTHKADPREIFLAIHHILKSRGHFLTPGAAKDFNTDKVDLEDIFPALTEAYAQVYPDLELTFDLAKADDFKAKLLDEQATPSDTQKALVNLLLSSDGEKEIVKKRKQVLTEFAKAITGLKTKFNLALGTEVDEADASNWQFSMGQLDDKWSNIETSMTDQGTEIFEQIQEHYRARLLNGIVPAGMSLSQAKVADYGQHKEDLELFKTYLKKLNDHELAKTIRGLYDRYINGDDAKPFLREDFVKALTKEVTAHPNEVSEQLLNRMGQANFMLKQRTKANGAIPVQLQQRELDQIIANQSKYYDWLAKPNPVEKHRASKPYQLDELLTFRIPYYVGPLITPKEQAESRENVFAWMIRKDPSGNITPYNFDEKVDCPASANMFIQRMKNTDTYLIGEDVLPKRSLLYQKYEVLNELNNVSIDGRRLGADQKQRLIREVFERHSSVTIKQVAENLVAHGDFAKRPEIRGLADEKRFLSSLSTYHQLKKILHEAIDDPTKEHDIENIITWSTVFEDAAIFKTELAKISWLDSDTIKALSNIRYRGWGQFSRKLLDGLKLGNGHTVIQELMLSNHNLMQILTDETLKTTMAELNQDKLKADDIEDVINDAYTSPSNKKALRQVLRVVEDIKHAANGQDPSWLYIETADGPGTAGKRTQSRQKQIQTVYANAAQELIDSAVRGELEDKIADKASFTDRLVLYFMQGGRDIYTGAPLNIDQLSHYDIDHILPQSLIKDDSLDNRVLVNATINREKNNVFASTLFASKMAATWRKWHEAGLISGRKLRNLMLRPDEIDKFAHGFVARQLVETRQIIKLTEQIAAAQYPNTKIIAVKAGLSHQLREELDFPKNRDVNHYHHAFDAFLAARIGTYLLKRYPKLAPFFTYGEFAKVDVKKFREFNFIGALTHAKKNIVAKDTGEIVWDKERDIQELDRIYNFKRMLITHEVYFETADLFKQTIYAAKDSKERGGSKQLIPKKQGYPTQVYGGYTRENTAYLAVVKTVEKKADVYRVVRIATSQVAALKEARAQSTVKERELLKKFLTTKFTKIGKNGKKAITPFDIVIPRVPREQLFHNKRYGFFMVNSDTLMHNYQELWMSRSDQQILSKLVKSAKTVENGQVGRLFENIVEQINKYFPLYDINQFRKKLDQSKDIFSKLPLEGNGTTSGKRETIQNILTGAGTGAKNGDLKNLGIKTPFGFLQVPSGIVLDDDTTLIYQSPTGMLNRIVRLSEL

SEQ ID NO: 1042 - protein, 1361 aa, Lactobacillus rhamnosus
MTKLNQPYGIGLDIGSNSIGFAVVDANSHLLRLKGETAIGARLFREGQSAAERRESRTTRRRLSRTRWRLSFLRDFFAPHITKIDPDFFLRQKYSEISPKDKDRFKYEKRLFNDRTDAEFYEDYPSMYHLRLHLMTHTHKADPREIFLAIHHILKSRGHFLTPGAAKDFNTDKVDLEDIFPALTEAYAQVYPDLELTFDLAKADDFKAKLLDEQATPSDTQKALVNLLLSSDGEKEIVKKRKQVLTEFAKAITGLKTKFNLALGTEVDEADASNWQFSMGQLDDKWSNIETSMTDQGTEIFEQIQELYRARLLNGIVPAGMSLSQAKVADYGQHKEDLELFKTYLKKLNDHELAKTIRGLYDRYINGDDAKPFLREDFVKALTKEVTAHPNEVSEQLLNRMGQANFMLKQRTKANGAIPVQLQQRELDQIIANQSKYYDWLAKPNPVEKHRASKPYQLDELLTFRIPYYVGPLITPKEQAESRENVFAWMIRKDPSGNITPYNFDEKVDCPASANMFIQRMKNTDTYLIGEDVLPKRSLLYQKYEVLNELNNVSIDGRRLGADQKQRLIREVFERHSSVTIKQVAENLVAHGDFAKRPEIRGLADEKRFLSSLSTYHQLKKILHEAIDDPTKEHDIENIITWSTVFEDAAIFKTELAKISWLDSDTIKALSNIRYRGWGQFSRKLLDGLKLGNGHTVIQELMLSNHNLMQILTDETLKTTMAELNQDKLKADDIEDVINDAYTSPSNKKALRQVLRVVEDIKHAANGQDPSWLYIETADGPGTAGKRTQSRQKQIQTVYANAAQELIDSAVRGELEDKIADKASFTDRLVLYFMQGGRDIYTGAPLNIDQLSHYDIDHILPQSLIKDDSLDNRVLVNATINREKNNVFASTLFASKMAATWRKWHEAGLISGRKLRNLMLRPDEIDKFAHGFVARQLVETRQIIKLTEQIAAAQYPNTKIIAVKAGLSHQLREELDFPKNRDVNHYHHAFDAFLAARIGTYLLKRYPKLAPFFTYGEFAKVDVKKFREFNFIGALTHAKKNIVAKDTGEIVWDKERDIQELDRIYNFKRMLITHEVYFETADLFKQTIYAAKDSKERGGSKQLIPKKQGYPTQVYGGYTRENTAYLAVVKTVEKKADVYRVVRIATSQVAALKEARAQSTVKERELLKKFLTTKFTKIGKNGKKAITPFDIVIPRVPREQLFHNKRYGFFMVNSDTLMHNYQELWMSRSDQQILSKLVKSAKTVENGQVGRLFENIVEQINKYFPLYDINQFRKKLDQSKDIFSKLPLEGNGTTSGKRETIQNILTGAGTGAKNGDLKNLGIKTPFGFLQVPSGIVLDDDTTLIYQSPTGMLNRIVRLSEL

SEQ ID NO: 1043 - protein, 1352 aa, Lactobacillus ruminis
MNDNFDLMRVKGKKGIGVRLYNEGQSAAERRMHRTARRRYGRRKWRLRLLEDFFDEHMAEVDDTFFARLKDSNISPKDDKKYRKSLLFPKSKGVTYQDDGEFYKKYPTMYHLRYALMTEHRKFDLREIYLAFHHMVKYRGNFLYDTSVDSFEAKNLDIKGKFDEINDLLSSYTDFYVDNSNAALVESILLEKNTTRKDKSKKIAKLLHVEDKEKGKNKKAKDLATQISNAVLGLKCNFHLIFELQQKYSFDLCSEKTEENIAKLSEVLDENQKMLLMILKEVQDQVMLNAFVPSGMSLSEAMMQKYDDYGEQLKIYHELEHSVSDDSAAKLRGAYRDYNDNIIKRIDGDNKKDTFYKRVKNILTKISKEYVDQDVLESCGKLKKLIDENKLFIRQRTAANGVLPHQLHQIEMRKIIDNQKEYYPWLAEPNPNEKRRVYSKYKVEELIAFRIPYYVGPLVDPNNADKNKEARFSWMVRKKDGEITPWNFYDKVDWAESANNFIERMKSKDTYLLGEDVVPKESMLYQKYEVLNELNNLRINDSGLSDSFEDVKLKQAIYNDLFKKQKIVKITDLQNYLVQNHKYLVKPKISGLADENRFLSSLSTYSDLKTIFGDKVDDRTYFNDFEKMVEYSTVFEDGHDYNQKLDEYTWLTKEEKYKIGKKRYRGWGKLSKKLLTGLRDKNNHTIMDNLWETNRNFMQIQTADEFSKQIAEENERHLKGSVSDAINDMYTSPANKKAIRQVLRVVDDIQKAMGYAPSSISLEFAREDGPSVRTVSRANRMKSIYEKYASEVSEEVMKDLDGVIKDKKGLNDRLYLYFEQQGKDMYSGHPLDFDKVISGQEYDIDHILPQAVIKDDSLDNRVLTTKALNNDVKSKGVPCRMFNGMHSFWKNLYDKGFISRRKFNNLTTNPENIDKYKMKGFVNRQLVETRQIIKLVANVLNDKYQNDDVDIIEVRAELTHDVRKHFKFYKNRNVNDYHHAFDAYLTSFIGHYLFKKYPNLRPLFDYNDFMKVSDNVFKQLRGNNFLGEFLNKTGDIISTDGNFVLNKEEMINKLNKAYAFKKILVTKEVGQRTGAMFNETRYPAPNSRKAALKYRRMPKPDSLISVKDYKNTDIYGGYSGKNDAYMVIVDMGKQYMVVGVPVRYTEKLDKLRIKHSELYRDELRKVLSRDKTLLDSKGNVKRFDIVLDRVLYGQLIEDGNELFTLGSSKYKRNFRQLFLDKQCIEILDSSATPQPTDEELIWVYDQILDKVDKYFELYDINRQRETLRKGRAAFCSLPNISMKKDDVTKKKILNEILVALHANESESNCEKIGKKVFGRLQVPGGIKLSKEAKLIYQSPTGLFERVVYLKDL

SEQ ID NO: 1044 - protein, 1339 aa, Lactobacillus salivarius
MERYHIGLDIGTSSIGWAVIGDDFKIKKKKGKNLIGTRLFNEGATAAERRGFRTQRRRLNRRKWRLKLLEEIFDPYMAEVDEYFFARLKSSNLSPKDSNKKYLGSLLFPDKSDSNFYDKYPTIYHLRRDLMEKDEKFDLREIYLAIHHIVKYRGNFLEKVPAKNYKNSGASIGFLLEEVNSLYKDIIGDESIAILNSEKFEDVEKIILDEETRNLDKQKSVGKLLVEDKKKKNIVTAFSKAIFGYKFNIEDLLLIENDEKNKLTFNDENIDDIFNELSHSLDDKQMDLLTKTREIYFKFKLNMIVPTGYTLSESMIEKYEMHKAHLKMYKEFINTLNTKDRKILKNAYSDYINTEKAKAANAQENFYKTVKKIIKDNNSDTAKKIIVLIDEGNFMPKQRTGENGVIPHQLHQIELDRIIENQAKYYPWLAEANPVEKNRKFAKYKLDELVTFRVPYYVGPLIDKTESNKNEKETKFAWMVRKAKGTITPWNFENLVDRTESANRFIKRMTSKDTYIIGEDVLPASSLLYEKFKVLNELNNIKVNEKKLDIEQKQDIYLNLFTTAKNVTKKSLATYLNCSADSISGLSDGEKFNSSLSSYIDLKAILGNIVDDCNKNEDLEKIIEYSTVFEDGNIYKEKLSEISWLTDEQIEKLSNIHFKGWGRLSKKLLTQITNENGERIIDALWNTSNNFMQIINDESIQAKLAEINGKYAGKSDLEDILSEAYTSPQNKKAIRQVMKVVEDIEKAMQCEPTSISIEFTRKKQKSRLTNTRYKKISDVYEKIADEVISEYELRKLQSELDSNANNMRDRYYLYFMQLGRDMYTGEKINIDELHQRYDIDHILPQSFIKDDSINNRVLTRKDVNNKEKSDKTAADLYAVEMSDFWRKLRKQGLITEQKYKNLLTKSDSIDKYAKKGFIKRQLVETSQVVKLVANILQDKYSDTKIIEVRAKLNSNLREEYKLIKNRAVNDYHHAIDGYLTTFIGQYLYKTYPKLRSYFVYNDFKKLDSNYLKHMKKFNFLWQLQDDKTIDIYDNVNNKFVLNVPEMKKYIQKIYNYKYMLVSKEVTTKNGAFYDQTKYNAKTVNLIPIKKNKPTNIYGGYKGKVSSYMMLVKIRKKKEVIYKFVGVPRLWTDELDRLKDTTERKILLNEIAKNSLSKTEQDFEVILDKVYYGQLIIDGNQKYTLGSSEYKYNAMQLHLSKHALEVLAKENVKDAEITDKDLVSVYEEILSVVNKYFELYDINKFRQKLNEGLEIFRKLPVYNVYESNKIKQVGKFEVLNRILMGLHANAMITDLKVLGIKTKLGQMQVNGGIKLSPDAKLIYQSPTGIFSRAVRVKDLG

SEQ ID NO: 1045 - protein, 629 aa, Lactobacillus salivarius
MERYHIGLDIGTSSIGWAVTGDDFKIKRKKGKNLIGTRLFKEGNTAAERRGFRTQRRRLNRRKWRLKLLEEIFDPYMAEVDEYFFARLKDSNLSPKDSNKKYLGSLLFPDISDSNFYDKYPTIYHLRRDLMEKDEKFDLREIYLAIHHIVKYRGNFLENVPAKNYKNSGASIGFLLEEVNNLYKDIVGDENVTILNSEKFEDVEKIILDDGIRNLDKQKGVGKLLVEDKKNKNLVTAFSKAIFGYKFNIEDLLLVEGDEKSKLTFNDENIDDIFNELSHSLDDRRMDLLTKTREIYFKFKLNMIVPTGYTLSESMIEKYEIHKAHLKMYKEFINTLNSKDRKILKNAYTDYINNEKAKAANAQENFYKTVKKTIKDNDSDIVKKIIDLIDEGNFMPKQRTGENGVIPHQLHQIELDRIIENQAKYYPWLAEENPVEKNRKFAKYKLDELVTFRVPYYVGPLVDKTESNKNEKETKFAWMVRKSKGTITPWNFENLVDRTESANRFIKRMTSKDTYIIGEDVLPASSLLYEKFKVLNELNNIKVNEKKLDIEQKQNIYLKLFTTTKNVTKKNLATFLNCSIESISGLSDDKKFNSSLSSYIDLKVILGDIVDDYSKNEDLEKIIEYSTIF

SEQ ID NO: 1046 - protein, 897 aa, Lactobacillus salivarius
  misc_feature (822)..(822): Xaa can be any naturally occurring amino acid
MLIESDEKNKLTFNDENIDDIFNELSHSLDDNQMDLLTKTREIYFKFKLNMIVPTGYTLSESMIEKYEMHKAHLKMYKEFINTLNAKDRKILKNAYSDYINNEKAKAANAQENFYKTIKKTIKDNNSDTAKKIIGLIDEGNFMPKQRTGENGVIPHQLHQIELDRIIENQAKYYPWLAEENPVEKNRKFAKYKLDELVTFRVPYYVGPLVDKTESNKNEKETKFAWMVRKAKGTITPWNFENLVDRTESANRFIKRMTSKDTYIIGEDVLPASSLLYEKFKVLNELNNIKVNKKKLDVEQKQHVYLDLFTTRKNVTKDNLATSLNCDVESITGLSDNEKFNSSLSSYIDLKAILGNAVDDCNKNKDLEKIIEYSTIFEDGNIYKEKLSEISWLTDEQIEKLSNIHFKGWGRLSKKLLTQITNENGERIIDALWNTSNNFIQIISDESIQAKLAEINGEYADKSNLEDILDEAYTSPQNKKAIRQVMKVVEDIEKAMKCKPTSIAIEFTRRKGKSKLTNTRYKKISETYEKITDELISEYELGKLQSKLDSKANNMRDIYYLYFMQLGRDMYTGEKINIDELHQYYDIDHIFPRSFIKDNSLNNRVLTRKEINNNEKADRTAADLYAVKMGDFWRKLRKQGLITEKKYKNLLTRTDSIDKYTKQSFIKRQLVETSQVVKMAANILQDKYSNTKIIEVRARLNSDLRKEYELIKNREVNDYHHAIDGYLTIFIGQYLYKTYPKLRSYFVYDDFKKLDSNYLKHMDKFNFIWKLEDKKAEDVYDNVNNEFILNVPKMKDYIQKIYNYKYMLISKEVTTESGAFYXZTKYNAKTINLIPIKKDKPTNIYGGYKGKVSSYMMLVKIQKKKEVIYKFVGVPRLWTDELDRLIDTDEKKALLKK

SEQ ID NO: 1047 - protein, 1419 aa, Lactobacillus sp.
MAKPQNYTIGLDIGTNSVGWTVTDDQNNILRIKSKKAIGARLFEEGKVAAERRSFRTTRRRLSRRKWRIKLLEELFDEEISKVDPNFFARSHESWISPKDKRERYSAIVFPTPEEDKKFHNEYPTIYHLRDRLMKDDQKHDIREIYVAIHHIMKYRGNFLHDESIETYRSGMSSLGGGDERTILNTKILDDLNDAFADNLATQGISVNSASADQINEIVTSGHLNVDSQKAIAKLLLPTTLSSDDKKQDKKIKKLATDAAKNVASAWLGYKANFAAILNIQEVDKDKKKIYSFALQGADEEDKVETLESVLSQDQIEIVDRIIRIRHAIVLGEIIPVGMTLSEAMIEKYDQHAKDLKNLKTVIRNLKDRKNAVKLQAIYDLYVNNRHADTAKAMKLAGVKKRTELLEPEEFNKSIEKLLDDSPVSAEIKKRIAEKDFLPLQRSNSNGVIPNQLHQIELDEIIKKQSKYYPFLGETNEHASADVARKAPTKLDQLLTFRVPYYVGPLITKEEQEEQDGHSFAWMIRKNPKDHEKITPWNFDEKVDRMASATQFIKRMTTKDTYLLGEDVLPSSSLKYQLFTVLNELNNLRINHKKLTREEKEQVIEDLFKKYKTVKADKFKNYWQKGHAGLDVKIQGMADPEKFNSTMSTYIDLQKIFGDQLDDAQRQNDFEKIIEYSTIFEDRKILGEKLRADFVWLSEDQIKRLCRLRLQGWGRLSLKLLTRLTDADGQNVLERLLNSNDNFMQIVKDPVIKAKIEQKNQKLLRADWSENATESILDEAYTSPQNKKAIRQVMRVVHDIVKACDGNLPAKFAIEFARSQDDDPKRTVARADRLQKIYAQISDEVVSQGVKDQLSGMKSLKDRYYLYFMQGGRDAYTGKPLNIDRLSDYDIDHIMPQSFIKDDSLDNRVLVTRAVNNQKSDNVPVLLYGNHLVADLGITIREMWDRWQKSGMISKRKLANLLTDPATLSEYRAEGFINRQLVETSQVIKLTATILQSEFPDSKIIEVPAKYNSILRKQFDLYKSREVNDYHHAIDAYLSTIVGNYLYQVYPNLRRLFVYGEFKKFSHGEEESSHQAVRRVKSMNFLDDLLRGKHGDDIYCRVTGEVIFSRKDIISKLKQAYSFKQMLVTQEVFTKKSALFDQTVYPSPARDSKTRSGLIPRKQGMDTEIYGGYSGNKDAYFVLAQVVKSKGHTLQVVGVPIRALRALANCSNYSEQLLKIVKAQVLFNKKTGKAKKGISDVRILLDKIPYRQPVLDGSAFYMLGSSTYKYNLKQISLSQQSMKYILDYIDDPNFNKHEMTKIDQQNEKECLLSVYDEILDKMDKYLSLYDINGFRKKLHVGRDKFIKLEVEKQAEAIKNVLRGFHANSDMTKLSDLGLSTSLGFMQASDGIKLSDNAVFIYQSPTGLFERRVKVSDLLK

SEQ ID NO: 1048 - protein, 1289 aa, Lactobacillus versmoldensis
MRRRYRRRRNRLNWLDELFADELAKIDPSFLLRMKNSWVSKKESTRKRDPYNLFIDEKYNDVDYFNQYPTIFHLRKELITEDKKVDIRLIYLAIHNIIKYRGNFTLENQNFDISQLSSNFSQQISDFFALFSDFGVIMPEDFDPDKISDILLNPNLSPSGKVSEAIATISPKTNVKAKIKIILLLLVGNNGDLKKLFDLETTEKIAVKLSSRHIDSELPIILSELNEQQENIITIANSIFGSIILKDFLGDETSISAAKVISFEDHKQDLQKLKTMWRETSNKEAVKAGKKAYEDYIGHEDSETFYKKIKKFLEKAQPVDLANKALAEIELENYLPKQRNRNNTVIPYQLNENELIAILDHQEKYYPFLKENRDKILSLLTFRIPYYVGPLQDSNNNRFSWMTRKASGAIRPWNFSEKVNVEQSSNDFIKRMRSTDTYLIGEPVLPKKSLIYQCYEVLSELNNTRVKDGSSNPKRLDVTIKQRIYNEIFKNQKSVSVKVLQNWLIKESYFKSPEISGLADKKKYLSSLSTYIDFKKIFGQRFVDDPVNSPQLEELAEWLTLFEDKKILLIKLQNSKYSYDQATINKLSTMRYQGTGKLSKKLLVDLKTTKKSIGKSGAESLSILDLMWSTKDNFMQIIHDADYTFEQQIKEFNYDTEDELTPLEKVANLHGSPALKRGLNQSIKVVADIVKFMGHDPEKIFIEFTRSDDFSKLTISRYRRIKKQYLEIAKAIKKIPAEFKDIKEYQTQLEENKGKLASERLMLYFLQCGHSLYSNKPIDLNMINSSKYHVDHILPQSYIKDDSLENKALVLASENENKIDNMLISHDIIATNLPRWQALKDQNLMGSKKFADLTRTTVTENQKKGFIQRQLVQTSQIVKNITLILNDLYKNTSCIETRATLSSEFRKAFSNFDETTYHYQFPEFVKNRDVNDFHHAQDAFLACVIGEYQLKKYPKDNLRLVYDQYSKFLDSLKKDTRKKNGRMPRYTQNGFIIGSMFNGKTYVDDNGEIIWDQKIKESIRKTFNYHQFNVVRQTIEQHGKLFNDTIQPHSDRYKLIPLKTNRDPAIYGGYNNDNNAYSVVLDVDGKKKINGIPIRIANQLKSDELDLSSWLENNIKHKKPMTILIDKVPKYQRIINEETGDLLITSANEVINNVQLFLPSMYTALISLLDSTKTEMYSKLLSNYEANILIDIYDYLLTKLKNNYPLYRKEWAKLAEHRDDFIESDLVTQASTLQQLIKFMHADPSNVNLKFGNFKGNRFGRKNGNIKLSKTDFIYESPTGLFKSIKHID

SEQ ID NO: 1049 - protein, 1372 aa, Legionella pneumophila
MESSQILSPIGIDLGGKFTGVCLSHLEAFAELPNHANTKYSVILIDHNNFQLSQAQRRATRHRVRNKKRNQFVKRVALQLFQHILSRDLNAKEETALCHYLNNRGYTYVDTDLDEYIKDETTINLLKELLPSESEHNFIDWFLQKMQSSEFRKILVSKVEEKKDDKELKNAVKNIKNFITGFEKNSVEGHRHRKVYFENIKSDITKDNQLDSIKKKIPSVCLSNLLGHLSNLQWKNLHRYLAKNPKQFDEQTFGNEFLRMLKNFRHLKGSQESLAVRNLIQQLEQSQDYISILEKTPPEITIPPYEARTNTGMEKDQSLLLNPEKLNNLYPNWRNLIPGIIDAHPFLEKDLEHTKLRDRKRIISPSKQDEKRDSYILQRYLDLNKKIDKFKIKKQLSFLGQGKQLPANLIETQKEMETHFNSSLVSVLIQIASAYNKEREDAAQGIWFDNAFSLCELSNINPPRKQKILPLLVGAILSEDFINNKDKWAKFKNFWNTHKIGRTSLKSKCKEIEEARKNSGNAFKIDYEEALNHPEHSNNKALIKIIQTIPDIIQAIQSHLGHNDSQALIYHNPFSLSQLYTILETKRDGFHKNCVAVTCENYWRSQKTEIDPEISYASRLPADSVRPFDGVLARMMQRLAYEIAMAKWEQIKHIPDNSSLLIPIYLEQNRFEFEESFKKIKGGSSDKTLEQAIEKQNIQWEEKFQRIINASMNICPYKGASIGGQGEIDHIYPRSLSKKHFGVIFNSEANLIYCSSQGNREKKEEHYLLEHLSPLYLKHQFGTDNVSDIKNFISQNVANIKKYISFHLLTPEQQKAARHALFLDYDDEAFKTITKFLMSQQKARVNGTQKFLGKQIMEFLSTLADSKQLQLEFSIKQITAEEVHDHRELLSKQEPKLVKSRQQSFPSHAIDATLTMSIGLKEFPQFSQELDNSWFINHLMPDEVHLNPVRSKEKYNKPNISSTPLFKDSLYAERFIPVWVKGETFAIGFSEKDLFEIKPSNKEKLFTLLKTYSTKNPGESLQELQAKSKAKWLYFPINKTLALEFLHHYFHKEIVTPDDTTVCHFINSLRYYTKKESITVKILKEPMPVLSVKFESSKKNVLGSFKHTIALPATKDWERLFNHPNFLALKANPAPNPKEFNEFIRKYFLSDNNPNSDIPNNGHNIKPQKHKAVRKVFSLPVIPGNAGTMMRIRRKDNKGQPLYQLQTIDDTPSMGIQINEDRLVKQEVLMDAYKTRNLSTIDGINNSEGQAYATFDNWLTLPVSTFKPEIIKLEMKPHSKTRRYIRITQSLADFIKTIDEALMIKPSDSIDDPLNMPNEIVCKNKLFGNELKPRDGKMKIVSTGKIVTYEFESDSTPQWIQTLYVTQLKKQP

SEQ ID NO: 1050 - protein, 907 aa, Leptospira inadai
MAKSIEEIRSIQNEFVVEYSILLKKIKKGEIDKKNDVYKVYQNTIKSSERLEQVLKERLGFQNVSKSYFNNPYSIAQLYNLISVDRSGFSKVCRSCQEENHWRSTLIDTDRGPQAQASKQVSDTGRPFDGQLAMLLDRIAFEIVKLKRIEIERLLSNKNSSKIEVVEIPLLIEENSFNFRYELAELKKLSKKKKDQLKKSVEEFDTKLNSKQERIKAASRELCPYTGKKISKGEIDHILPRSWTQKQFGTALNAEANLIYASREGNQSKGNREYGLNDLDEKYLNIIFGTKEVDSIQRNISDTIDRLDIERGTTRIVFDRLAPNERDCLRHALFIKSLRPKVFELLSGQLKARVNGTQLYLAKRIRSLLLKNQDFITKSLIIKVPSFSFYEPRTVDLPYMRKELAEKFPNLGKQNPQPTGSHIIDAAMVMAYAVETDSGNLSFGSKDKSEGFDSESLSRFLPSNIQFLSIKSKDKTDSKYPYKKPLFKDGVFGERFLPILIAEKGLRVGYTLENSLEVNSENPEEFFNVLKPYLLFKRKPIESNYQTLVAFAQKDKRGYIVLPVNKPKALESISQRKSDPHTSILKNILYTVSRESIPSLIFDKNTLIPEIKSNKVNWGDKLEKKFRIKIEIKLYGKKIADGFIRYPGKTEWEKLLLTEPLKGLVKNKTLTPKWFDSLENLAGLDDHFKDTSNPEAKHKRKSNHYALPVPKGPSGGFRIRRNSFDGYKVYQLYSVDGNSFHAFKIENGWTGKTLLLDIYQNSGNLHSLDYDYENTDISQTALFSKFYKIEFSKEETQKINSKGIKSLYVAPGSSSRQYIRVIFDKQTFSKFIKFQSKFWEFDLITPLPKDKAKDLIESILKIFPEDLRPKKPRNDIHIQNISHDSVQVEYIADGKTQGFGQYFINQN

SEQ ID NO: 1051 - protein, 418 aa, Leptospira inadai
MILKSPIAIDLGAKNTGIVYTTYQPNALPTEIHGATIISDNLKLSQVDRRAKRHQRRNYTRMKLARRLVYLIIRYHYRIPEQDLTPEVKTSLQSLLTRRGYTFQSIETEGNELGQAPWGEIEDYFPNVQDYEKSLPIQTVLYHFFSSENLELNKLVPSKEPETKEDKNILKYIREQKEAFESEQNNGARHRLKYFEEIKEDFPRKIKLMECLQKNKIEEKKFLNLIQNISNLQIKPLRAYFNDKDMKEKEIWEPRRLHTYIARWIRSWHIDPKNSSKRLIRQKLLSQLENGKLKIIRDTSIYSPSKDIISFLEEIDPKDTIPPYEDQNNRHPPRCQNLWLDGKILDRYFPGWEQSLWKLIRNEKNNPFEQLITKDFRTDDTISEGKSLSEQIQIYERSHSNIKLDVRAVILQRFLDRS

SEQ ID NO: 1052 - protein, 125 aa, Leptospira inadai
MSAYDRSANLDPWSLRLQGKAKKEIKTTESLSKTDLQKASDAYEKIKEILSESDTDQFIKLANRYYLEVADIKKGMWLPTAPERKHKEIPKSIAHEENQDISLFHKCNTKTGSKKRISQVSLEMF

SEQ ID NO: 1053 - protein, 1355 aa, Leuconostoc gelidum
MTYSIGLDIGTGSVGWAVIGDDYRLKRAKGKNLIGVRLFDSATTAAERRGYRTTRRRLSRRHWRLRLLNDIFASDLAEQDENFLPRLKYSWVNPDDEQNPQLNSDVANGALFGSSETDKAFHKNYPTIYHLRHELMTDTAKHDLREVYLAIHHIVKYRGNFLNTADKINAENSFNVDLFIAALDEYNEFLETPITSIKDAQLFSDKLTDINARNKSVRVENAMSETYDDKSKIFKAILTALVGNTANFQTIFDLSDLEKDEAKNFKFKLDLEDVETKLDVVRAKLSDEQNAFLEAVLIAYDGITLKMILGDYKSISQSMIESYKSHQRDWKYIKNNVRLNEQKIEPDKNSVKFFKLDPKKLIYPSNLAYLQVISSNEDEHRKGLDYFKTAIQDADILQRIENDTFLPRQRTKRNGVLPYQLHLAELEQIIKKQSKYYPFLANIYTQDNKTENKLIGLLKFRVPYYVGPLVEAEKVTGDGKNHWLIKKELQENTPITPFNFDDVVDKDKSGEQFIKRITGTDSYLIGEPTLPENSLLYQKYNVLQELNNVRNERHQRLPIKVKQDIFEHVFKIDKNVNAKKVMAYLKLNGYGDFQIAGLSDTRTGKFNSNLSSYNYFVDLLGREKTEKIREDRLEEIIEIQTVFEDKILVAKRLSNLDFLTPQEKSKLSAKHYTGWGRLSQKLLTTQFIKTALSEAGDIIPQSHSIIDLLYYTDKNLMEILNDKTFNVRNWLTEQNKGTESGNSLYDQIDALAGPKDIKRGITQVFSIIDDIKKAMGSNPETVYLEFARETQTSRLTNSRLNRVQEIYNSPELKTEFAYLAKKLEAETKESIHDDRLYLYYLQEGRDMYTGKEIPFDQISSNYDIDHIIPQAFTKDDSLDNRVLVNRATNARKSNSPTFTNDIIDNRKSWWQSLVKRGLMSKEKFERLTDKRKTFSENQTNHFIARQLVETRQIIKNVADLIKNNYDGTQAVAIRASLTGEMRRYLDWPKNRDMNDYHHAHDALMMATVGKYVDRRGFFDNGSVSDGAGNAYNLYTKDWLVAARVGTRNDSQRVNPYGFIVGSMNSKAVRQQVNKETGEIVWGNENLDYLRHVLSYKKILVTRRLSGSSGRLYAETLFSPNPKAKLIAQKANRSVALYGGFTKAESAYTALVEFNKKGDRSYKLIKVPMAIANRVNDKQITVTAYIASLNLRDFSRVVLEHLPLGTLIRESDGSEFYAASSEYKHNAKELWAPKEILRSSKKLDKATADNLIDIFDFLTNDKTISNFKFYEKDLLHLKNVRDKFVEASDEIKIKVLSDVIYELHNDAGWRDPFKHIQEKPAWTMLQVKGGIKLSEKAAIVYQSPTGLFETITIVGE

SEQ ID NO: 1054 - protein, 883 aa, Leuconostoc pseudomesenteroides
MIGVRLFEGADTAAERRGYRTTRRRLSRRRWRLRLLNDIFASELSKIDENFLPRLKYSWVNKNDTDNVHFGVGVFDNSEQEKAFYQDYPTIYHLRQKLMTDNRQHDLREVYLAIHHIVKYRGHFLNSGEISANSSFDAQKFLELLREFDNTFYPDAVKFLNLDQLDLPDKISSEISDSKISKSERVDRVLQHVQLANSGAKKILKAILNAVVGNSVDSVAMFSLSDLDKEEKKKINHPVTDSKPFKYSDKEVEAKLDELSNLLQDEQKIEFLSLLKLSFDGLTLKMLLGNAKSVSEAMVERYKVHKDDLKFIKENILNSFSKDKKKEFDKYYEAHLAEKDVDNVDKYFKKIIDDSIISKDKKIELLQKIDDHDFLPSQRSKINGAIPHQLHRNELDKIISQQSKYYPFLADSYTQNGKTETKLAGLVNFRVPYYVGPLVSKENADRNNPDGGQNHWVEFKENTSLSNLTPWNFNEIVDKDKSAAKFIERLTGMDTYLIGEPTLPQNSLLYQKYNVLQELNNIRVDNHKLDVKIKQDVFEHLFKTQNSVSAKDVKNYLIANGYAAPSIQITGLSDTNEKTFNSKLSSYNYLVDKLGRTFVESVKSDVLEKIIELQTVFEDKTVLLRQLSMISELTLAQANQLAEKHWTGWGRLSRKLLSSKVVDVNKITNSTFYPATSRQTIIDTLYHTQLNLMEIINNAEDLYGVRQWISEQNKSDSSDTNDVYDQIQELAGDKKIKRGITQSFRILDDIVKAMGGEPERVYLEFARENQQSGVSFSRKNLLSKLYENDSLKQTFKELKSQLESETKENLQNDRLYLYYLQQGRDMYSNDELNIDQLSSYDIDHIIPQAYTKDNSFDNRVLVSSKANRLKRMLLWYPVKLSKK

SEQ ID NO: 1055 - protein, 468 aa, Leuconostoc pseudomesenteroides
MKDQGFISKRKFENLTRRGDFSEQQKERFIARALVETRQIIVNVSSLIDSHFNHTKAVAVKSNMTTDMRHYTKVPKNRDINDYHHAHDALFVATVGQYIENKGFMKAGKLSDSVGNEYNRYTKKWIETARKNTNYGRVNPFGFVVGSMQTATRGKLDYETGELKVVKNNYWSKDDLDYLLKVVSYKKILVTTKLQDNKGAMYDANLISAKGSGKKKAQLQISKSKNIDLYGGFNKLQNEYSVLILNHDEYRWLSIPMYARNSSEQYLHDKYPDAKVILNHILVGQPILLSNSSDPQKSKFASLRIATGGDYHNNFEFVPSVDVKKILDNIYLNHSVTDDEYKKVFESLLATLHDKFVFGIHQVMYNKIFDNKYLFDKMPDEAKRNVINSLLKFMNISKNQLGAVGKIGGKVNGVLYGFKTETEKGTSAGQLISNGKMQPHDIFIFQSPTGIFERRVTVAELANVIKDE

SEQ ID NO: 1056 - protein, 1103 aa, Listeria innocua
LKLYPGEKSTGMFAQFISLIVGSKGNFQKPFDLIEKSDIECAKDSYEEDLESLLALIGDEYAELFVAAKNAYSAVVLSSIITVAETETNAKLSASMIERFDTHEEDLGELKAFIKLHLPKHYEEIFSNTEKHGYAGYIDGKTKQADFYKYMKTTLENIEGADYFIAKIEKENFLRKQRTFDNGAIPHQLHLEELEAILHQQAKYYPFLKENYDKIKSLVTFRIPYFVGPLANGQSEFAWLTRKADGEIRPWNIEEKVDFGKSAVDFIEKMTNKDTYLPKENVLPKHSLCYQKYLVYNELTKVRYINDQGKTSYFSGQEKEQIFNDLFKQKRKVKKKDLELFLRNMSHVESPTIEGLEDSFNSSYSTYHDLLKVGIKQEILDNPVNTEMLENIVKILTVFEDKRMIKEQLQQFSDVLDGVVLKKLERRHYTGWGRLSAKLLMGIRDKQSHLTILDYLMNDDGLNRNLMQLINDSNLSFKSIIEKEQVTTADKDIQSIVADLAGSPAIKKGILQSLKIVDELVSVMGYPPQTIVVEMARENQTTGKGKNNSRPRYKSLEKAIKEFGSQILKEHPTDNQELKNNRLYLYYLQNGKDMYTGQDLDIHNLSNYDIDHIVPQSFITDNSIDNLVLTSSAGNREKGNDVPPLEIVQKRKVFWEKLYQGNLMSKRKFDYLTKAERGGLTEADKARFIHRQLVETRQITKNVANILHQRFNYGKDDHGNTMKQVRIVTLKSALVSQFRKQFQLYKVRGVNDYHHAHDAYLNGVVANTLLKVYPQLEPEFVYGDYHQFDWFKANKATAKKQFYTNIMLFFAQKDRIIDENGEILWDKKYLDTVKKVMSYRQMNIVKKTEIQKGEFSKATIKPKGNSSKLIPRKTNWDPMKYGGLDSPNMAYAVVIEYAKGKNKLVFEKKIIRVTIMERKAFEKDEKAFLEEQGYRQPKVLAKLPKYTLYECEEGRRRMLASANEAQKGNQQVLPNHLVTLLHHAANCEVSDGKSLDYIESNREMFAELLAHVSEFAKRYTLAEANLNKINQLFEQNKEGDIKAIAQSFVDLMAFNAMGAPASFKFFETTIERKRYNNLKELLNSTIIYQSITGLYESRKRLDD

SEQ ID NO: 1057 - protein, 1337 aa, Listeria innocua
MKNMKKPYTIGLDIGTNSVGWAVLTDQYDLVKRKMKIAGDSEKKQIKKNFWGVRLFDEGQTAADRRMARTARRRIERRRNRISYLQGIFAEEMSKTDANFFCRLSDSFYVDNEKRNSRHPFFATIEEEVEYHKNYPTIYHLREELVNSSEKADLRLVYLALAHIIKYRGNFLIEGALDTQNTSVDGIYKQFIQTYNQVFASGIEDGSLKKLEDNKDVAKILVEKVTRKEKLERILKLYPGEKSAGMFAQFISLIVGSKGNFQKPFDLIEKSDIECAKDSYEEDLESLLALIGDEYAELFVAAKNAYSAVVLSSIITVAETETNAKLSASMIERFDTHEEDLGELKAFIKLHLPKHYEEIFSNTEKHGYAGYIDGKTKQADFYKYMKMTLENIEGADYFIAKIEKENFLRKQRTFDNGAIPHQLHLEELEAILHQQAKYYPFLKENYDKIKSLVTFRIPYFVGPLANGQSEFAWLTRKADGEIRPWNIEEKVDFGKSAVDFIEKMTNKDTYLPKENVLPKHSLCYQKYLVYNELTKVRYINDQGKTSYFSGQEKEQIFNDLFKQKRKVKKKDLELFLRNMSHVESPTIEGLEDSFNSSYSTYHDLLKVGIKQEILDNPVNTEMLENIVKILTVFEDKRMIKEQLQQFSDVLDGVVLKKLERRHYTGWGRLSAKLLMGIRDKQSHLTILDYLMNDDGLNRNLMQLINDSNLSFKSIIEKEQVTTADKDIQSIVADLAGSPAIKKGILQSLKIVDELVSVMGYPPQTIVVEMARENQTTGKGKNNSRPRYKSLEKAIKEFGSQILKEHPTDNQELRNNRLYLYYLQNGKDMYTGQDLDIHNLSNYDIDHIVPQSFITDNSIDNLVLTSSAGNREKGDDVPPLEIVRKRKVFWEKLYQGNLMSKRKFDYLTKAERGGLTEADKARFIHRQLVETRQITKNVANILHQRFNYEKDDHGNTMKQVRIVTLKSALVSQFRKQFQLYKVRDVNDYHHAHDAYLNGVVANTLLKVYPQLEPEFVYGDYHQFDWFKANKATAKKQFYTNIMLFFAQKDRIIDENGEILWDKKYLDTVKKVMSYRQMNIVKKTEIQKGEFSKATIKPKGNSSKLISRKTNWDPMKYGGLDSPNMAYAVVIEYAKGKNKLVFEKKIIRVTIMERKAFEKDEKAFLEEQGYRQPKVLAKLPKYTLYECEEGRRRMLASANEAQKGNQQVLPNHLVTLLHHVANCEVSDGKSLDYIESNREMFAELLAHVSEFAKRYTLAEANLNKINQLFEQNKEGDIKAIAQSFVDLMAFNAMGAPASFKFFETTIERKRYNNLKELLNSTIIYQSITGLYESRKRLDD

SEQ ID NO: 1058 - protein, 953 aa, Listeria ivanovii
MKKMLANIDGADYFIDQIEEENFLRKQRTFDNGTIPHQLHLEELEAILHQQAKYYPFLRKDYEKIRSLVTFRIPYFIGPLANGQSDFAWLTRKADGEIRPWNIEEKVDFGKSAIDFIEKMTNKDTYLPKENVLPKHSLCYQKYMVYNELTKIRYIDDQGKTHHFSGQEKQQIFNGLFKQQRKVKKKDLERFLYTINHIESPTIEGVEDAFNSSFATYHDLQKGGVTQEILDNPLNADMLEEIVKILTVFEDKRMIKEQLQSFSDVLDGTILKKLERRHYTGWGRLSAKLLTGIRDKHSHLTILDYLMNDDGLNRNLMQLINDSNLSFKSIIEKEQVSTADKGIQSIVAELAGSPAIKKGILQSLKIVDELVGIMGYPPQTIVVEMARENQTTGKGKNNSKPRFISLEKAIKEFGSQILKEHPTDNQCLKNDRLYLYYLQNGKDMYTGKELDIHNLSNYDIDHIIPQSFITDNSIDNRVLVSSTANREKGDNVPLLEVVRKRKAFWEKLYQAKLMSKRKFDYLTKAERGGLTEADKANFIQRQLVETRQITKNVANILYQRFNCKQDENGNEVEQVRIVTLKSTLVSQFRKQFQLYKVREVNDYHHAHDAYLNGVVANTLLKVYPQLEPEFVYGDYHQFDWFKANKATAKKQFYTNIMRFFAKENQIIDKNGEILWDNRYLDTIKKVLSYRQMNIVKKTEIQKGEFSNATVNPKGNSSKLISRKADWNPIKYGGFDGSNMAYSIVIEYEKRKKKTVIKKELIQINIMERVAFEKDQKAFLEEKGYYSPKVLTKIPKYTLYECENGRRRMLGSANEAQKGNQMVLPNHLMTLLYHAKNCEANDGESLAYIEMHREMFAELLAYISEFAKRYTLANDRLEKINMFFEQNKKGDIKVIAKSFDKLKVFNAFGAPRDFEFFETTIKRKRYYNIKELLNATIIYQSITGLYEARKRLED

SEQ ID NO: 1059 - protein, 232 aa, Listeria ivanovii
MMSKLILGLDIGISSVGWGVLDESTNEVVDAGVRLFEEATRNGNEDRRGFRSARRLKRRRQHRLERAKGLIENNGFSCTDINKFNPYQARYNAIFGEVTKDELAAALFHLVKRRGTTIDAPEEEVKDVENELSTKMQLEKNAKKLATKYDYICEIQLEKLKENKVVRDHENRFRTEDYVKEARAILENQQEYYPEVTNEFIESYMALIETRRMYYDGPGSEKSPTPYGQYFI

SEQ ID NO: 1060 - protein, 300 aa, Listeria monocytogenes
DDGLNRNLMQLINDSNLSFKSIIEKEQVSTTDKDLQSIVADLAGSPAIKKGILQSLKIVDELVSIMGYPPQTIVVEMARENQTTVKGKNNSRPRYKSLEKAIKEFGSQILKEHPTDNQELRNNRLYLYYLQNGKDMYTGQELDIHNLSNYDIDHIVPQSFITDNSIDNLVLTSSAGNREKGDDVPPLEIVRKRKVFWEKLFQGNLMSKRKFDYLTKAERGGLTEADKATFIHRQLVETRQITKNVANILHQRFNNETDNHGNNMEQVRIVMLKSALVSQFRKQFQLYKVREVNDYHHAHD

SEQ ID NO: 1061 - protein, 782 aa, Listeria monocytogenes
  MOD_RES (722)..(722): Any naturally occurring amino acid
IFNDLFKQKRKVKKKDLELFLRNINQIESPTIEGLEDSFNASYATYHDLLKVGMKQEILDNPLNTEMLEDIVKILTVFEDKRMIKEQLQQFSDVLDGVVLKKLERRHYTGWGRLSAKLLVGIRDKQSHLTILEYLMNDDGLNRNLMQLINDSNLSFKSIIEKEQVSTTDKDLQSIVADLAGSPAIKKGILQSLKIVDELVSIMGYPPQTIVVEMARENQTTVKGKNNSRPRYKSLEKAIKEFGSQILKEHPTDNQELKNNRLYLYYLQNGKDIYTGQELDIHNLSNYDIDHIVPQSFITDNSIDNLVLTSSAGNREKGDDVPPLEIVRKRKVFWEKLYQGNLMSKRKFDYLTKAERGGLTEADKARFIHRQLVETRQITKNVANILHQRFNNETDNHGNTMEQVRIVTLKSALVSQFRKQFQLYKVREVNDYHHAHDAYLNGVVANTLLKVYPQLEPEFVYGEYHQFDWFKANKATAKKQFYTNIMLFFAQKERIIDENGEILWDKKYLETIKKVLDYRQMNIVKKTEIQKGEFSKATIKPKGNSSKLIPRKENWDPMKYGGLDSPNMAYAVIIEHAKGKKKIVIEKKLIQINIMERKMFEKDEEAFLEEKGYRHPKVLTKLPKYTLYECEKGRRRMLASANEAQKGNQLVLSNHLVSLLYHAKNCEASDGKSLKYTEAHRETFSELLAQVSEFATRYTLADANLSKINNLFEQNKEGDIKXIAQSFVDLMVFNAMGAPASFKFFEATIDRKRYTNLKELLSSTIIYQSITGLYESRKRLDD

SEQ ID NO: 1062 - protein, 1334 aa, Listeria monocytogenes; identical to SEQ ID NO: 109

SEQ ID NO: 1063 - protein, 1334 aa, Listeria monocytogenes
MKNPYTIGLDIGTNSVGWAVLTDQYDLVKRKMKVAGNSDKKQIKKNFWGVRLFDDGQTAVDRRMNRTARRRIERRRNRISYLQEIFAVEMANIDANFFCRLNDSFYVDSEKRNSRHPFFATIEEEVAYHKNYRTIYHLREELVNSSEKADLRLVYLALAHIIKYRGNFLIEGALDTKNTSVDEVYKQFIQTYNQVFMSNIEEGALAKVEENTEVASILAGKFTRREKFERILRLYPGEKSTGMFAQFISLIVGNKGNFQKVFNLVEKTDIECAKDSYEEDLEALLAIIGDEYAELFVAAKNTYNAVVLSSIITVTATETNAKLSASMIERFDAHEKELGELKAFIKLHLPKQYQEIFNNAEIDGYAGYIDGKTKQVDFYKYLKTTLENVEGADYFITKIEEENFLRKQRTFDNGVIPHQLHLEELEAILHQQAKYYPFLREGYDKIKSLVTFRIPYFVGPLANGQSEFAWLTRKDDGEIRPWNIEEKVDFGKSAVDFIEKMTNKDTYLPKENVLPKHSLCYQKYMVYNELTKIRYIDDQGKTNYFSGREKQQIFNDLFKQKRKVKKKDLELFLRNINHIESPTIEGLEDSFNASYATYHDLLKVGLKQEILDNPLNTEILEDIVKILTVFEDKRMIKEQLEQFSDVLDGVVLKKLERRHYTGWGRLSAKLLVGIRDKQSHLTILDYLMNDDGLNRNLMQLINDSNLSFKSIIEKEQVSTTDKDLQSIVADLAGSPAIKKGILQSLKIVDELVSIMGYPPQTIVVEMARENQTTGKGKNNSKPRYKSLEKAIKDFGSQILKEHPTDNQELKNNRLYLYYLQNGKDIYTGQELDIHNLSNYDIDHIVPQSFITDNSIDNLVLTSSAGNREKGGDVPPLEIVRKRKVFWEKLYQGNLMSKRKFDYLTKAERGGLTEADKARFIHRQLVETRQITKNVANILHQRFNKETDNHGNTMEQVRIVTLKSALVSQFRKQFQLYKVREVNDYHHAHDAYLNGVVANTLLKVYPQLEPEFVYGEYHQFDWFKANKATAKKQFYTNIMLFFAQKERIIDENGEILWDKKYLETIKKVLDYRQINIVKKTEIQKGEFSKATIKPKGNSSKLIPRKENWDPMKYGGLDSPNMAYAVIIEHAKGKKKIVIEKKLIQINIMERKMFEKDEEAFLEEKGYHQPKVLTKLPKYTLYECEKGRRRMLSSANEAQKGNQLVLSNHLVSLLYHAKNCEASDGKSLKYIEAHRETFSELLAQVSEFATKYTLADANLSKINNLFEQNKEGDIKAIAQSFVDLMAFNAMGAPASFKFFEATIDRKRYTNLKELLSSTIIYQSITGLYESRKRLDD

SEQ ID NO: 1064 - protein, 1334 aa, Listeria monocytogenes
MKNPYTIGLDIGTNSVGWAVLTDQYDLVKRKMKVAGNSDKKQIKKNFWGVRLFDDGQTAVDRRMNRTARRRIERRRNRISYLQEIFAVEMANIDANFFCRLNDSFYVDSEKRNSRHPFFATIEEEVAYHKNYRTIYHLREELVNSSEKADLRLVYLALAHIIKYRGNFLIEGALDTKNTSVDEVYKQFIQTYNQVFMSNIEEGALAKVEENTEVASILAGKFTRREKFERILRLYPGEKSTGMFAQFISLIVGNKGNFQKVFNLVEKTDIECAKDSYEEDLEALLAIIGDEYAELFVAAKNTYNAVVLSSIITVTATETNAKLSASMIERFDAHEKELGELKAFIKLHLPKQYQEIFNNAEIDGYAGYIDGKTKQVDFYKYLKTTLENVEGADYFITKIEEENFLRKQRTFDNGVIPHQLHLEELEAILHQQAKYYPFLREGYDKIKSLVTFRIPYFVGPLANGQSEFAWLTRKDDGEIRPWNIEEKVDFGKSAVDFIEKMTNKDTYLPKENVLPKHSLCYQKYMVYNELTKIRYIDDQGKTNYFSGREKQQIFNDLFKQKRKVKKKDLELFLRNINHIESPTIEGLEDSFNASYATYHDLLKVGLKQEILDNPLNTEILEDIVKILTVFEDKRMIKEQLEQFSDVLDGVVLKKLERRHYTGWGRLSAKLLVGIRDKQSHLTILDYLMNDDGLNRNLMQLINDSNLSFKSIIEKEQVSTTDKDLQSIVADLAGSPAIKKGILQSLKIVDELVSIMGYPPQTIVVEMARENQTTGKGKNNSKPRYKSLEKAIKDFGSQILKEHPTDNQELKNNRLYLYYLQNGKDIYTGQELDIHNLSNYDIDHIVPQSFITDNSIDNLVLTSSAGNREKGGDVPPLEIVRKRKVFWEKLYQGNLMSKRKFDYLTKAERGGLTEADKARFIHRQLVETRQITKNVANILHQRFNKETDNHGNTMEQVRIVTLKSALVSQFRKQFQLYKVREVNDYHHAHDAYLNGVVANTLLKVYPQLEPEFVYGEYHQFDWFKANKATAKKQFYTNIMLFFAQKERIIDENGEILWDKKYLETIKKVLDYRQINIVKKTEIQKGEFSKATIKPKGNSSKLIPRKENWDPVKYGGLDSPNMAYAVIIEHAKGKKKIVIEKKLIQINIMERKMFEKDEEAFLEEKGYHQPKVLTKLPKYTLYECEKGRRRMLSSANEAQKGNQLVLSNHLVSLLYHAKNCEASDGKSLKYIEAHRETFSELLAQVSEFATKYTLADANLSKINNLFEQNKEGDIKAIAQSFVDLMAFNAMGAPASFKFFEATIDRKRYTNLKELLSSTIIYQSITGLYESRKRLDD

SEQ ID NO: 1065 - protein, 1099 aa, Listeria monocytogenes
MKNPYTIGLDIGTNSVGWAVLTDQYDLVKRKMKVAGNSDKKQIKKNFWGVRLFDDGQTAVDRRMNRTARRRIERRRNRISYLQEIFAVEMANIDANFFCRLNDSFYVDSEKRNSRHPFFATIEEEVAYHKNYRTIYHLREELVNSSEKADLRLVYLALAHIIKYRGNFLIEGALDTKNTSVDEVYKQFIQTYNQVFMSNIEEGALAKVEENTEVASILAGKFTRREKFERILRLYPGEKSTGMFAQFISLIVGNKGNFQKVFNLVEKTDIECAKDSYEEDLEALLAIIGDEYAELFVAAKNTYNAVVLSSIITVTATETNAKLSASMIERFDAHEKELGELKAFIKLHLPKQYQEIFNNAEIDGYAGYIDGKTKQVDFYKYLKTTLENVEGADYFITKIEEENFLRKQRTFDNGVIPHQLHLEELEAILHQQAKYYPFLREGYDKIKSLVTFRIPYFVGPLANGQSEFAWLTRKDDGEIRPWNIEEKVDFGKSAVDFIEKMTNKDTYLPKENVLPKHSLCYQKYMVYNELTKIRYIDDQGKTNYFSGREKQQIFNDLFKQKRKVKKKDLELFLRNINHIESPTIEGLEDSFNASYATYHDLLKVGLKQEILDNPLNTEILEDIVKILTVFEDKRMIKEQLEQFSDVLDGVVLKKLERRHYTGWGRLSAKLLVGIRDKQSHLTILDYLMNDDGLNRNLMQLINDSNLSFKSIIEKEQVSTTDKDLQSIVADLAGSPAIKKGILQSLKIVDELVSIMGYPPQTIVVEMARENQTTGKGKNNSKPRYKSLEKAIKDFGSQILKEHPTDNQELKNNRLYLYYLQNGKDIYTGQELDIHNLSNYDIDHIVPQSFITDNSIDNLVLTSSAGNREKGGDVPPLEIVRKRKVFWEKLYQGNLMSKRKFDYLTKAERGGLTEADKARFIHRQLVETRQITKNVANILHQRFNKETDNHGNTMEQVRIVTLKSALVSQFRKQFQLYKVREVNDYHHAHDAYLNGVVANTLLKVYPQLEPEFVYGEYHQFDWFKANKATAKKQFYTNIMLFFAQKERIIDENGEILWDKKYLETIKKVLDYRQINIVKKTEIQKGEFSKATIKPKGIPAN

SEQ ID NO: 1066 - protein, 1334 aa, Listeria monocytogenes
MKNPYTIGLDIGTNSVGWAVLTDQYDLVKRKMKVAGNSDKKQIKKNFWGVRLFDEGETAADRRMNRTARRRIERRRNRISYLQEIFALEMANIDANFFCRLNDSFYVDSEKRNSRHPFFATIEEEVAYHKNYRTIYHLREELVNSSEKADLRLVYLALAHIIKYRGNFLIEGALDTKNTSVDGVYKQFIQTYNQVFISNIEEGTLAKMEENTTVADILAGKFTRKEKLERILQLYPGEKSTGMFAQFISLIVGSKGNFQKVFDLVEKTDIECAKDSYEEDLEALLAIIGDEYAELFVAAKNTYNAVVLSSIITVTDTETNAKLSASMIERFDAHEKDLSELKAFIKLHLPKQYEEIFSNVAIDGYAGYIDGKTKQVDFYKYLKTLLENIEGADYFIAKIEEENFLRKQRTFDNGAIPHQLHLEELEAILHQQAKYYPFLKEAYDKIKSLVTFRIPYFVGPLANGQSDFAWLTRKADGEIRPWNIEEKVDFGKSAVDFIEKMTNKDTYLPKENVLPKHSLYYQKYMVYNELTKVRYIDDQGKTNYFSGQEKQQIFNDYFKQKRKVSKKDLEQFLRNMSHIESPTIEGLEDSFNSSYATYHDLLKVGIKQEVLENPLNTEMLEDIVKILTVFEDKRMIKEQLQQFSDVLDGAVLKKLERRHYTGWGRLSAKLLVGIRDKQSHLTILDYLMNDDGLNRNLMQLINDSNLSFKSIIEKEQVSTTDKDLQSIVADLAGSPAIKKGILQSLKIVDELVSIMGYPPQTIVVEMARENQTTVKGKNNSRPRYKSLEKAIKEFGSQILKEHPTDNQELRNNRLYLYYLQNGKDMYTGQELDIHNLSNYDIDHIVPQSFITDNSIDNLVLTSSAGNREKGDDVPPLEIVRKRKVFWEKLFQGNLMSKRKFDYLTKAERGGLTEADKATFIHRQLVETRQITKNVANILHQRFNNETDNHGNNMEQVRIVMLKSALVSQFRKQFQLYKVREVNDYHHAHDAYLNGVVANTLLKVYPQLEPEFVYGEYHQFDWFKANKATAKKQFYTNIMLFFAQKERIIDENGEILWDKKYLETIKKVLDYRQMNIVKKTEIQKGEFSKATIKPKGNSSKLIPRKENWDPMKYGGLDSPNMAYAVIIEHAKGKKKVVFEKKIIRITIMERKAFEKDEKSFLEKQGYRQPKVLTKLPKYTLYECENGRRRMLASANEAQKGNQQVLKGQLITLLHHAKNCEASDGKSLDYIESNREMFGELLAHVSEFAKRYTLADANLSKINQLFEQNKDNDIKVIAQSFVNLMAFNAMGAPASFKFFEATIERKRYTNLKELLSATIIYQSITGLYEARKRLDG

SEQ ID NO: 1067 - protein, 1334 aa, Listeria monocytogenes
MKNPYTIGLDIGTNSVGWAVLTNQYDLVKRKMKVAGNSDKKQIKKNFWGVRLFDDGQTAVDRRMNRTARRRIERRRNRISYLQEIFAVEMANIDANFFCRLNDSFYVDSEKRNSRHPFFATIEEEVAYHKNYRTIYHLREELVNSSEKADLRLVYLALAHIIKYRGNFLIEGALDTKNTSVDGVYEQFIQTYNQVFMSNIEEGTLAKVEENIEVANILAGKFTRREKFERILQLYPGEKSTGMFAQFISLIVGSKGNFQKVFDLIEKTDIECAKDSYEEDLEALLAIIGDEYAELFVAAKNTYNAVVLSSIITVTATETNAKLSASMIERFDAHEKDLGELKAFIKLHLPKQYQEIFNNAAIDGYAGYIDGKTKQVDFYKYLKTILENIEGADYFIAKIEEENFLRKQRTFDNGAIPHQLHLEELEAIIHQQAKYYPFLREDYEKIKSLVTFRIPYFVGPLAKGQSEFAWLTRKADGEIRPWNIEEKVDFGKSAVDFIEKMTNKDTYLPKENVLPKHSLCYQKYMVYNELTKVRYIDDQGKTNYFSGQEKQQIFNDLFKQKRKVKKKDLELFLRNINHIESPTIEGLEDSFNASYATYHDLLKVGMKQEILDNPLNTEMLEDIVKILTVFEDKPMIKEQLQQFSDVLDGGVLKKLERRHYTGWGRLSAKLLVGIREKQSHLTILDYLMNDDGLNRNLMQLINDSNLSFKSIIEKEQVSTTDKDLQSIVADLAGSPAIKKGILQSLKIVDELVSIMGYPPQTIVVEMARENQTTGKGKNNSKPRYKSLEKAIKEFGSKILKEHPTDNQELKNNRLYLYYLQNGKDMYTGQELDIHNLSNYDIDHIVPQSFITDNSIDNLVLTSSAGNREKGGDVPPLEIVRKRKVFWEKLYQGNLMSKRKFDYLTKAERGGLTDADKARFIHRQLVETRQITKNVANILHQRFNNETDNHGNTMEQVRIVTLKSALVSQFRKQFQLYKVREVNDYHHAHDAYLNGVVANTLLKVYPQLEPEFVYGEYHQFDWFKANKATAKKQFYTNIMLFFGQKERIIDENGEILWDKKYLETIKKVLDYRQMNIVKKTEIQKGEFSKATIKPKGNSSKLIPRKENWDPMKYGGLDSPNMAYAVIIEHAKGKKKLIFEKKIIRITIMERKMFEKDEEAFLEEKGYRHPKVLTKLPKYTLYECEKGRRRMLASANEAQKGNQLVLSNHLVSLLYHAKNCEASDGKSLKYIEAHRETFSELLAQVSEFATRYTLADANLSKINNLFEQNKEGDIQAIAQSFVDLMAFNAMGAPASFKFFEATIDRKRYTNLKELLSSTIIYQSITGLYESRKRLDD

SEQ ID NO: 1068 - protein, 874 aa, Listeria seeligeri; identical to SEQ ID NO: 175

SEQ ID NO: 1069 - protein, 1087 aa, Listeriaceae bacterium
MKKLVLGLDIGVASVGWGIIDAENGDVVDTGVRLFSSRDASENESRRTSRQSRRLSRRKKHRRERIKQLLLAHDMDICDIVNENPYELRVKGLNEKLEVSEIYVALTHLAKRRGVSYLDDVVEEGGTIKSEHLNKNMEEIKSGKMPCEIQLERFEKYGQVRGMIEINQDTEESSFLVNIFRTSDYIKEAKTILATQQKFHKQITNEFIDEYIHIMASKRDYFIGPGNEKSRTDYGVYRTNGDTWDNLFEILIGKCSVFPEETRAARSSYVAQEFNLLNDLNNLKISNLESGKLSASQKHDIVEKVKNSKKFGTKDLLKYIASVCECKIEDIGGCRVDKNRKPIMHTFENYRKVHNALNEAGVDLRLSETDYDELMKIMTLNSETLEIKKQCKEKLPQLTEDYLNVCLVLNKKGAFSGWHALSLKAMKLMMPELYGTSKNQMQIIHTMQLGKAYLKPLNQQKYLNSEAILEEIYNPIAARSIRQTIKVTNAILKKYGHLDSVIIEMPRDYQTSEDERKMIEKMQKENEKEKKAALKRAREEYPFPDEAFRNHKELATKLRLWYQQDQFCVYSGRKISVVDLVRNPNQFEIDHIIPQSVSLDDSLNNKVLCFSEENQKKGQQTPFYYHKGKSGNWTYEQYKLFVEKLFDKKKISNKKRELLLFEEDINKWDVRRGFIARNLVDTRYASRVILNSYQQYFGNHEMGTKVKVVRGKFTSQLRKKWRIFKDRNESHSHHAIDALIVAATANLRLWKKNTLGVSDEGKVYDKETGEILPFEKLTESEYNEMMNKEPYLNFKTKLQNIETKVKYSYRVSKKVNRKISDATIYSTRERDGIDYIVGKIKNIYDVKTYKDQFLKRYKKNKEQFLMYQHDPQTFAILENIMATYQDAENPFLAYKKEYGVIRKYSKKGGGSPVTSLKFIDKVLGQKIDLTAKNQAALPKNKKVVLQSITPYRADVYYDEIDKRYHLIGVKYSLFSFSKQGYVINPIAYQKLLEKEQIHSEMKFCFSLYREDIIEFGEDPDSLTRYRFWSKNESGKNKIEVKPIEKPNFEKQTVLTITKKIKILNKYQTDVLGNSFKAQEEKDPRNIE

SEQ ID NO: 1070 - protein, 1345 aa, Marinilabilia sp.
MKKILGLDLGTTSIGWAFIKEPEKDVVGSEIVDMGVRIVALSSDEENDFAKGNTISINADRTLKRGARRNLQRFKLRRDALLEIFKEMKLIPSNFKYAEDGPSSTFSTLKLRDKAAKEKIELDDLVKVLLQINKKRGYRSSRKAKSEEDDGSAIDSMGIAKELYENDLTPGQWVFEALQKGRKNVPDFYRSDLQEEFKKIVNYQSEFYPDVLNSSFVEDWMGKASTPTKQYFNKKGVHLAENKGKREERRLQEYNWRAVAVNSKIDLSEIALILSQINSQISNSSGYLGAISDRSKELYFKNQTVGQYLYQQIKINPHTRLKGQVFYRQDYLDEFEKIWSVQSGFHPQLNDALKKEIRDITIFFQRRLKSQKHLISNCEFEDYHKVVPKSHPIFQEFRIWQNLNNLTLIKKDNLNEKSELALEDKIALANELAFKREQSVKDALNILGLKSSEWEFNFTKIEGNRTNHAFFEAFAKIIEIEDGEPLDLGNLKADDILDQFSEAFLRIGIDPGLLQVNNDIEGPNYEKQPYIQFWHLLYSSEDDQKLKQNLIKKFGFKPDHAKILASISLQDDHASLSSRAIKKILPHLQSGLIYDKACTYAGYNHSSSFTKEENEKRELSSELDLLKKNSLRNPVVEKILNQMINVVNAILKDPNLGKPDEIRVEMARELKANAEQRKNMTSNIASATRDHEKYREILKKEFGLKRVTKNDLLRYKLWLETDGISLYTGKPIEASKLFSKEYDIEHIIPKTRLFDDSFSNKTICERQLNIDKANVTAFSFLQNKLSGDEFEQYQSRVKSLFGKLSKAKIQKLLMANDKIPEDFIARQLQETRYISKKAKEILFEITRRVSVTTGTITDKLREDWGLVEIMKELNWEKYDKLGLTYTIEGKHGERLNKIKDWSKRNDHRHHAMDALTVALTKPAYIQYLNNLNAKELNGKKSTEIFAIEQKYLKRENGKLCFIPPVENIRTEAKKHLSKVLISYKAKNKVVTINKNRTNKKAGFNEQIALTPRGQLHKETVYGKAFHYSTKFEKIGASFDVQKINAVAKKEEREALLKRLAENGDDPKKAFTGKNSLSKMPIYLDLKRNIKLPEKVKTVVLEQNYTIRKNIDPDLKLDKVIDVGVKRILENRLKEFGGNAKLALSNLDENPIWLNKEKGITIKRVKISGVSNVESLHVKKDHFGEPILDQVGNEIPVDFVSTGNNHHVAIYEDEKGNLQEEVVSFFEAVVRQNQGLPIINKNHSLGWKFLFTLKQNEYFVFPSDDFDPTDVDLMDEENYHLISPNLFRVQKFTTKDYFFRHHLETTVEDKSELKGVSFKRLGLPGLNCIKKIRINHLGKIIQVGEY

SEQ ID NO: 1071 - protein, 1091 aa, Mobiluncus mulieris
MDSRKYRVGIDVGTNSVGFAAVEEDDSGSPTRFLNTMVVIHDSGVDSEQKKYAITRLASAGTARRTRRLYRTRRQRLRELDDFISNELGYPLVNLENFADPYEPWKVRADLATTKLPNDELPEAMSIALRHMARHRGWRSPYQRVEALHLHAEISKEFAALKERVVEKTGDVFSDDATPAEVLVDLMGRQKVRGADGVLSGKLRQSDNANELRKIASVQGIDDETLNRIIDRVFSSKSPKGKASERVGMDALPGQGSKPRALKAMPSFQKFRVVSVICNLRIKDSGGDARPLSMEEKEKLIDYLMSSTTDDHVTWTDVADLLHVKRSQLQGTAKEGFDGERPYTRPPVNSTWSKIKDSKIKSLVALWKTGDVDVQSAIVEALSNASVLEDSRPGADIVVAYLESLDDKELESLDKVGLPAGRASYSEDSLERLTERMLRDDCDLFEARKREFNVADDWKPPADPIYAPVGNPGVDRVLKIVNRLLMAAEREWGAPTQINIEHVRSGFSSELMQREFERENERRRAQNEEAVKAILTEKGGNSRVSKYDITRYYAVKRQHCQCLYCGTPITFSDCELDHIVPRKGVGSTNTRVNLAAACRSCNRDKSNLPFAVWAGKASNFDVSIDDAVSRVKQWQRSQNEGVREFRAFQNEVISRLLKTTEDPEIDSRSLESVAWMARELHHRVEYYFQSKGAQTQVSVYRGAVTAQARKSSGLEDKVKMIGGGGKTRLDRRHHAMDAATIALMTPGISTTLSEKNNLRDAQKFTGQSETWKDYCGRTETARKHFAVWKSNMERLTDLFNDKLENDAIPVVQPLRLRLSNSKAHDDGIGKLDSKKLGSVWSLADIDRAATPQIWTALTRCDDFDPTKGLPENANRVIRAQGVKYESEDNIPVFPSNVAAIAVRDGYAEIGSTIHHARIYRIDDGKKTFYSMIRVFAVDLLKHQAEDLFTVKLPPSAISIRTCEDSLRRALSNGTAEYLGWLVPGDEIIVDTSDKAFHTGQIGDLLRNFPVNSFRLTGFPSNSRLRLKPVLLAGEGLRDDAEDSIKKILLGQGWRPAINVLFSKGKPRIVRRNSLGIERPSSNNGLPFSWEA

SEQ ID NO: 1072 - protein, 1233 aa, Mycoplasma canis
MEKKRKVTLGFDLGIASIGWAIVDSETNQVYKLGSRLFDAPDTNLERRTQRGTRRLLRRRKYRNQKFYNLVKRTEVFGLSSREAIENRFRELSIKYPNIIELKTKALSQEVCPDEIAWILHDYLKNRGYFYDEKETKEDFDQQTVESMPSYKLNEFYKKYGYFKGALSQPTESEMKDNKDLKEAFFFDFSNKEWLKEINYFFNVQKNILSETFIEEFKKIFSFTRDISKGPGSDNMPSPYGIFGEFGDNGQGGRYEHIWDKNIGKCSIFTNEQRAPKYLPSALIFNFLNELANIRLYSTDKKNIQPLWKLSSIDKLNILLNLFNLPISEKKKKLTNANINDIVKKESTKSIMLSVEDIDMIKDEWAGKEPNVYGVGLSGLNIEESAKENKFKFQDLKILNVLINLLDNVGIKFEFKDRNDIIKNLELLDNLYLFLIYQKESNNKDSSIDLFIAKNELLNIENLKLKLKEFLLGAGNEFENHNSKTHSLSKKAIDAILPKLLDNNEGWNLEAIKNYDEEIKSQIEDNSSLMAKQDKKYLNDNFLKDAILPPNVKVTFQQAILIFNKIIQKFSKDFEIDKVVIELAREMTQDQENDALKGIAKAQKSKKSLVEERLEANNIDKSVFNDKYEKLIYKIFLWISQDFKDPYTGAQISTNEIVNNKVEIDHIIPYSLCFDDSSANKVLVHKQSNQEKSNSLPYEYIKQGHSGWNWDEFTKYVKRVFVNNVDSILSKKERLKKSENLLTTSYDGYDKLGFLARNLNDTRYATILFRDQLNNYAEHHLIDNKKMFKVIAMNGAVTSFIRKNMSYDNKLRLKDRSDFSHHAYDAAIIALFSNKTKTLYNLIDPSLNGIISKRSEGYWVIEDRYTGEIKELKKEDWTSIKNNVQARKIAKEIEEYLIDLDDEVFFSRKTKRKTNRQLYNETIYGIAAKTDEDGITNYYKKEKFSILDDKDIYLRLLREREKFVINQSNPEVIDQIIEIIESYGKENNIPSRDEAINIKYTKNKINYNLYLKQYMRSLTKSLDQFSEEFINQMIANKTFVLYNPTKNTTRKIKFLRLVNDVKINDIRKNQVINKFNGKNNEPKAFYENINSLGAIVFKNSANNFKTLSINTQIAIFGDKNWDIEDFKTYNMEKIEKYKEIYGIDKTYNFHSFIFPGTILLDKQNKEFYYISSIQTVRDIIEIKFLNKIEFKDENKNPDTSKTPKRLMFGIKSIMNNYEQVDISPFGINKKIFE

SEQ ID NO: 1073 - protein, 1233 aa, Mycoplasma canis
MEKKRKVTLGFDLGIASVGWAIVDSETNQVYKLGSRLFDAPDTNLERRTQRGTRRLLRRRKYRNQKFYNLVKRTEVFGLSSREAIENRFRELSIKYPNIIELKTKALSQEVCPDEIAWILHDYLKNRGYFYDEKETKEDFDQQTIESMPSYKLNEFYKKYGYFKGALSQPTESEMKDNKDLKEAFFFDFSNKEWLKEINYFFNVQKNILSETFIEEFKKIFSFTRDISKGPGSDNMPSPYGIFGEFGDNGQGGRYEHIWDKNIGKCSIFTNEQRAPKYLPSALIFNFLNELANIRLYSTDKKNIQPLWKLSSIDKLNILLNLFNLPISEKKKKLTSANINDIVKKESTKSIMLSVEDIDMIKDEWAGKEPNVYGVGLSGLNIEESAKENKFKFQDLKILNVLINLLDNVGIKFEFKDRNDIIKNLELLDNLYLFLIYQKESNNKDSSIDLFIAKNESLNIENLKLKLKEFLLGAGNEFENHNSKTHSLSKKAIDAILPKLLDNNEGWNLEAIKNYDEEIKSQIEDNSFLMAKQDKKYLNDNFLKDAILPPNVKVTFQQAILIFNKIIQKFSKDFEIDKVVIELAREMTQDQENDALKGIAKAQKSKKSLVEERLEANNIDKSVFNEKYEKLIYKIFLWISQDFKDPYTGAKISANEIVDNKVEIDHIIPYSLCFDDSSANKVLVHKQSNQEKSNSLPYEYIKQGHSGWNWDEFTKYVKRVFVNNVDSILSKKERLKKSENLLTTSYDGYDKLGFLARNLNDTRYATILFRDQLNNYAEHHLIDDKKMFKVIAMNGAVTSFIRKNMSYDNKLRLKNRNDFSHHAYDAAIIALFSNKTKTLYNLIDPSLNGIISKRSEGYWVIEDRYTGEIKELKKEDWTSIKNNVQARKIAKEIEEYLIDLDDEVFFSRKTKRKTNRQLYNETIYGIAAKTDEDGITNYYKKEKLSILDDKDIYLRLLREREKFVINQSNPEVIDQIIEIIESYGKENNIPSRDEAINIKYTKNKINYNLYLKQYMRSLTKSLDQFSEEFINQMIANKTFVLYNPTKNTTRKIKFLRLVNDVKINDIRKNQVINKFNGKNNEPKAFYENINSLGAIVFKNSANNFKTLSINTQIAIFGDKNWDIEDFKTYNMEKIEKYKEIYGIDKTYNFHSFIFPGTILLDKQNKEFYYISSIQTVRDIIEIKFLNKIEFKDENKNQDTSKTPKRLMFGIKSIMNNYEQVDISPFGINKKIFE

SEQ ID NO: 1074 - protein, 1233 aa, Mycoplasma canis; identical to SEQ ID NO: 242

SEQ ID NO: 1075 - protein, 1233 aa, Mycoplasma canis
MEKKRKVTLGFDLGIASVGWAIVDSETNQVYKLGSRLFDAPDTNLERRTQRGTRRLLRRRKYRNQKFYNLVKRTEVFGLSSREAIENRFRELSIKYPNIIELKTKALSQEVCPDEIAWILHDYLKNRGYFYDEKETKEDFDQQTVESMPSYKLNEFYKKYGYFKGALSQPTESEMKDNKDLKEAFFFDFSNKEWLKEINYFFNVQKNILSETFIEEFKKIFSFTRDISKGPGSDNMPSPYGIFGEFGDNGQGGRYEHIWDKNIGKCSIFTNEQRAPKYLPSALIFNFLNELANIRLYSTDKKNIQPLWKLSSVDKLNILLNLFNLPISEKKKKLTSTNINDIVKKESIKSIMISVEDIDMIKDEWAGKEPNVYGVGLSGLNIEENAKENKFKFQDLKILNVLINLLDNVGIKFEFKDRNDIIKNLELLDNLYLFLIYQKESNNKDSSIDLFIAKNKSLNIENLKLKLKEFLLGAGNEFENHNSKSHSLSKKAIDAILPKLLDNNEGWNLEAIKNYDEEIKSQIEDNSSLMAKQDKKYLNDNFLKDAILPPNVKVTFQQAILIFNKIIQKFSKDFEIDKVVIELAREMTQDQENDALKGMAKAQKSKKSLVEERLEANNIDKSVFNDKYEKLIYKIFLWISQDFKDPYTGAQISVNEIVNNKVEIDHIIPYSLCFDDSSANKVLVHKQSNQEKSNSLPYEYIKQGHSGWNWDEFTKYVKRVFVNNVDSILSKKERLKKSENLLTTSYDGYDKLGFLARNLNDTRYATILFRDQLNNYAEHHLIDNKKMFKVIAMNGAVTSFIRKNMSYDNKLRLKDRSDFSHHAYDAAIIALFSNKTKTLYNLIDPSLNGIISKRSEGYWVIEDRYTGEIKELKKEDWTSIKNNVQARKIAKEIEEYLIDLDDEVFFSRKTKRKTNRQLYNETIYGIAAKTDEDGITNYYKKEKFSILDDKDIYLRLLREREKFVINQSNPEVIDQIIEIIESYGKENNIPSRDEAINIKYTKNKINYNLYLKQYMRSLTKSLDKFSEEFINQMIANKTFVLYNPTKNTTRKIKFLRLVNDVKINDIRKNQVINKFNGKNNEPKAFYENINSLGAIVFKNSANNFKTLSINTQIAIFGDKNWDIEDFKTYNMEKIEKYKEIYGIDKTYNFHSFIFPGTILLDKQNKEFYYISSIQTVRDIIEIKFLNKIEFKDENKNQDTSKTPKRLMFGIKSIMNNYEQVDISPFGINKKIFE

SEQ ID NO: 1076 - protein, 1233 aa, Mycoplasma canis
MEKKRKVTLGFDLGIASVGWAIVDSETNQVYKLGSRLFDAPDTNLERRTQRGTRRLLRRRKYRNQKFYNLVKRTEVFGLSSREAIENRFRELSIKYPNIIELKTKALSQEVCPDEIAWILHDYLKNRGYFYDEKETKEDFDQQTVESMPSYKLNEFYKKYGYFKGALSQPTESEMKDNKDLKEAFFFDFSNKEWLKEINYFFNVQKNILSETFIEEFKKIFSFTRDISKGPGSDNMPSPYGIFGEFGDNGQGGRYEHIWDKNIGKCSIFTNEQRAPKYLPSALIFNFLNELANIRLYSTDKKNIQPLWKLSSVDKLNILLNLFNLPISEKKKKLTSTNINDIVKKESIKSIMLSVEDIDMIKYEWAGKEPNVYGVGLSGLNIEESAKENKFKFQDLKILNVLINLLDNVGIKFEFKDRNDIIKNLELLDNLYLFLIYQKESNNKDSSIDLFIAKNKSLNIENLKLKLKEFLLGAGNEFENHNSKTHSLSKKAIDAILPKLLDNNEGWNLEAIKNYDEEIKSQIEDNSSLMAKQDKKYLNDNFLKDAILPPNVKVTFQQAILIFNKIIQKFSKDFEIDKVVIELAREMTQDQENDALKGIAKAQKSKKSLVEERLEANNIDKSVFDDKYEKLIYKIFLWISQDFKDPYTGAKISANEIVNNKVEIDHIIPYSLCFDDSSANKVLVHKQSNQEKSNSLPYEYIKQGHSGWNWDEFTKYVKRVFVNNVDSILSKKERLKKSENLLTTSYDGYDKLGFLARNLNDTRYATILFRDQLNNYAEHHLIDNKKMFKVIAMNGAVTSFIRKNMSYDNKLRLKDRSDFSHHAYDAAIIALFSNKTKTLYNLIDPSLNGIISKRSEGYWVIEDRYTGEIKELKKEDWTSIKNNVQARKIAKEIEEYLIDLDDEVFFSRKTKRKTNRQLYNETIYGIAAKTDEDGITNYYKKEKFSILDDKDIYLRLLREREKFVINQSNPEVIDQIIEIIESYGKENNIPSRDEAINIKYTKNKINYNLYLKQYMRSLTKSLDQFSEEFINQMIANKTFVLYNPTKNTTRKIKFLRLVNDVKINDIRKNQVINKFNGKNNEPKAFYENINSLGAIVFKNSANNFKTLSINTQIAIFGDKNWDIEDFKTYNMEKIEKYKEIYGIDKTYNFHSFIFPGTILLDKQNKEFYYISSIQTVRDIIEIKFLNKIEFKDENKNQDTSKTPKRLMFGIKSIMNNYEQVDISPFGINKKIFE

SEQ ID NO: 1077 - protein, 1239 aa, Mycoplasma cynos
MEEKRKVTLGFDLGVASVGWAIVDSETNEVYKLGSRLFDIPDTNIDRRAKRGSRRLVRRRSYRNQKFYNLIKRTKTFGFLDKEAIEKEFVLLSIKYPNIIELKVKGLQEEVSKSEAVWILHDYLKNRGYFYDDKEEKDDLENPSIESMPSYKLYEFYKEYGYFKGALSSPTESEKNKDSDLEKAIFFNFSNKEWTKEINHFFKIQKNIFSEDFKAKFMEFFSFIRDISKGPGSENMPSQYSIFGKYGDDGMGGKYQHIWDKNIGKCSIFKDKVRAPKYLPSALFFNLLNELSNIRLYSVDKREKSVLWRLSSKDKINIILNILQIILFKNDGKISNLDINKIVKNESIKSIILNEIDLDLIKDMWFEKEPNVYGIGLSGLNIEENKKENRFKFQDLKIFSVFIDLLKKSNINIEFNNEKDIIHNLKLLDELYFFLITQKYSRDKYGSIKKFILNNKSFNIDNLDEKLNIFLSISDDEFDNHNSKTHSLSKEAIYFIFPKLLHNNEGWNLEAIKNYDIDVREEISKHSFGIKKQDKKYLDDAFLDDAILPPSVKVTIKQSILIFNKIIKKFSNKFQIDNVVIELAREMTQEKEMDAQKSLNRLKKSRKKIIEERLNANNIDSKMFRDKTGEISPNYIYKIYLWISQNFKDPYTGENISANDILKNNVEIDHIIPYSLCFDDSSSNKVLVFKHSNQSKGNFLPFDMISTFSENSVWNWKEYTQYVEKTFKTNLESILDKKERVKKADNLLTSSYDGYDKLGFLARNLNDTRYATILFRDQLINYSENHLIDSKKMFKVIAMNGGVTSFIRKNMSFDSGLKVKDRSIFSHHAYDAAIIALFSNKTKILYNLINPSLDGIISKRSEGYWVLEDRLTGEIRKLNYNDWQSIKNNVEVKKIAREIESHLSNLDNVVMFSRKSKRKTNKELYNETLYGIATRIDENGIKNYYKKEKFNILEDENIYLRLLNERENFIINRSNPEVIDAIIEIFETIDKNKIPARDVAKNIKYTDNKIKYNLYLKDYMRKLVDEFPDKFRKDFIEQMIAKKIFILFNPIKNTTRKIKSLRSINNNKIEDIRKKQVLEKFNTAKNEPRSFYESLNSLGAIIFKNNLNIYKKMSISSQIATFGDKNWKIDDINTYNKEKLNKYKEIYGIDETYDFYSFIFPGTILLDEKNKEFLYISSIQTLKDKIELKFLDRIEFEKKNVNSNLKPKIKREIISTKKLMSDYKIIKISPLGINKKIFE

SEQ ID NO: 1078 - protein, 1269 aa, Mycoplasma gallisepticum
MNNSIKSKPEVTIGLDLGVGSVGWAIVDNETNIIHHLGSRLFSQAKTAEDRRSFRGARRLIRRRKYKLKRFINLIWKYNSYFGFKNKEDILNNYQEQQKLHNTVLNLKLEALNAKIDPKALSWILHDYLKNRGHFYEDNRDFNVYPTEELANYFGEYGYYKGIIDSKEDNDDKLEEGLTKYKFSNQHWLEEIKKVLSNQTGLPEKFKEEYESLFSYVRNYSEGPGSINSVSPYGIYHLDEKEGKVVQKYNNIWDKTIGKCSIFPDEYRAPKNSPIAMIFNEINELSTIRSYSIYLTGWFINQEFKKAYLNKLLDLLIKTNSEKPIDARQFKKLREETIAESIGKETLKDVEREEKLEKEDHKWKLKGLKLNTNGKIQYNDLSSLAKFVHKLKQHLKLDFLLEDQYTTLDKINFLQSLFVYLGKHLRYSNRVDSANLKEFSDSNKLFERVLQEQKDDLFKLFEQTDKDDEKILAQTHSLSTKAMLLAITRMTNLDNDEDNQKNNDKGWNFEAIKNFDQKFIDITKKNNNLSLKQDKRYLDDRFINDAILSPGVKRILREATKVFNAILKQFSEEYDVTKVVIELARELSEEKELENTKNYEKLIKKNSDKISERLEALDIAEDKIEDILKSPTKSYKVLLWLQQDHIDPYSQKEIAFEDILTKTEKTEIDHIIPYSISFDDSSSNKLLVLAESNQAKSNQTPYEFITSGNAGIKWEDYEAYCRKFKDGDTSLLDSTQRSKKFAKMMKTDTSSKYDIGFLARNLNDTRYATIVFRDALKDYANNHLVEDKPMFKVVCINGGVTSFLRKNFDKSWYAKKDRDKNIHHAVDASIISIFSNETKTLFNQLTQFADYKLFKNTDGSWKKIDPKTGVVTEVTDENWKQIRVRNQVSEIAKVINKCIQDSNIERKARYSRKIENKTNISLFNDTVYSAKKVGYEDQIKRKNLKTLDIHESAEENKNSKVKKQFVYRKLVNVSLLNNDKLADLFAEKEDILMYRANPWVINLAEQIFNEYTENKKIKSQNVFEKYMLDLTKEFPEKFSEAFVKSMLRNKTAIIYNVEKKVVHRIKRLKILSSELKENKLSNVIIRSKNESGTKLSYQDTINSIALMIMRSIDPTAKKQYIRVPLNTLNLHLGDQDFDLHNIDAYLKKPKFVKYLKANEIGDEYKPWRVLTSGTLLIHKKDKKLMYISSFQNLKDVIEIKNLIETEYKENDDSDPKKKKKANRFLMTLSTILNDYILLDAKDNFDILGLSKNRIDEILNSKLGLDKITK

SEQ ID NO: 1079 - protein, 1224 aa, Mycoplasma gallisepticum
MNNSIKSKPEVTIGLDLGVGSVGWAIVDNETNIIHHLGSRLFSQAKTAEDRRSFRGARRLIRRRKYKLKRFINLIWKYNSYFGFKNKEDILNNYQEQQKLHNTVLNLKLEALNAKIDPKALSWILHDYLKNRGHFYEDNRDFNVYPTEELANYFGEYGYYKGIIDSKEDNDDKLEEGLTKYKFSNQHWLEEIKKVLSNQTGLPEKFKEEYESLFSYVRNYSEGPGSINSVSPYGIYHLDEKEGKVVQKYNNIWDKTIGKCSIFPDEYRAPKNSPIAMIFNEINELSTIRSYSIYLTGWFINQEFKKAYLNKLLDLLIKTNSEKPIDARQFKKLREETIAESIGKETLKDVEREEKLEKEDHKWKLKGLKLNTNGKIQYNDLSSLAKFVHKLKQHLKLDFLLEDQYTTLDKINFLQSLFVYLGKHLRYSNRVDSANLKEFSDSNKLFERVLQEQKDDLFKLFEQTDKDDEKILAQTHSLSTKAMLLAITRMTNLDNDEDNQKNNDKGWNFEAIKNFDQKFIDITKKNNNLSLKQDKRYLDDRFINDAILSPGVKRILREATKVFNAILKQFSEEYDVTKVVIELARELSEEKELENTKNYEKLIKKNSDKISERLEALDIAEDKIEDILKSPTKSYKVLLWLQQDHIDPYSQKEIAFEDILTKTEKTEIDHIIPYSISFDDSSSNKLLVLAESNQAKSNQTPYEFITSGNAGIKWEDYEAYCRKFKDGDTSLLDSTQRSKKFAKMMKTDTSSKYDIGFLARNLNDTRYATIVFRDALKDYANNHLVEDKPMFKVVCINGGVTSFLRKNFDKSWYAKKDRDKNIHHAVDASIISIFSNETKTLFNQLTQFADYKLFKNTDGSWKKIDPKTGVVTEVTDENWKQIRVRNQVSEIAKVINKCIQDSNIERKARYSRKIENKTNISLFNDTVYSAKKVGYEDQIKRKNLKTLDIHESAEENKNSKVKKQFVYRKLVNVSLLNNDKLADLFAEKEDILMYRANPWVINLAEQIFNEYTENKKIKSQNVFEKYMLDLTKEFPEKFSEAFVKSMLRNKTAIIYNVEKKVVHRIKRLKILSSELKENKLSNVIIRSKNESGTKLSYQDTINSIALMIMRSIDPTAKKQYIRVPLNTLNLHLGDQDFDLHNIDAYLKKPKFVKYLKANEIGDEYKPWRVLTSGTLLIHKKDKKLMYISSFQNLKDVIEIKNLIETEYKENDDSDPKKRRKQIGS

SEQ ID NO: 1080 - protein, 1269 aa, Mycoplasma gallisepticum; identical to SEQ ID NO: 133

SEQ ID NO: 1081 - protein, 226 aa, Mycoplasma iowae
MSNKKKITIGLDIGVSSVGWSILREDNVLIDYGSRLFPDAANAKDGKLENEARRSHRSMRRRIRRIKTRKNDLIKLLIKYNIISDQDELAKILEQGIVNETGNVPIVEIKYKGLKEKLSKEELLICLYHYIHKRGYFYITEEDLKENGENINRLPTEIQYDFYMKNGYYIGNEDNQKFSNLIWVKEIEKFLSKQSLDSNFVDEYISLFRRVRDYSDGPGSEKSPTP

SEQ ID NO: 1082 - protein, 1304 aa, Mycoplasma synoviae
MLNNVQNLWKYLLLLIFDKKIIFLFKIKVILIRRYMENNNKEKIVIGFDLGVASVGWSIVNAETKEVIDLGVRLFSEPEKADYRRAKRTTRRLLRRKKFKREKFHKLILKNAEIFGLQSRNEILNVYKDQSSKYRNILKLKINALKEEIKPSELVWILRDYLQNRGYFYKNEKLTDEFVSNSFPSKKLHEHYEKYGFFRGSVKLDNKLDNKKDKAKEKDEEEESDAKKESEELIFSNKQWINEIVKVFENQSYLTESFKEEYLKLFNYVRPFNKGPGSKNSRTAYGVFSTDIDPETNKFKDYSNIWDKTIGKCSLFEEEIRAPKNLPSALIFNLQNEICTIKNEFTEFKNWWLNAEQKSEILKFVFTELFNWKDKKYSDKKFNKNLQDKIKKYLLNFALENFNLNEEILKNRDLENDTVLGLKGVKYYEKSNATADAALEFSSLKPLYVFIKFLKEKKLDLNYLLGLENTEILYFLDSIYLAISYSSDLKERNEWFKKLLKELYPKIKNNNLEIIENVEDIFEITDQEKFESFSKTHSLSREAFNHIIPLLLSNNEGKNYESLKHSNEELKKRTEKAELKAQQNQKYLKDNFLKEALVPLSVKTSVLQAIKIFNQIIKNFGKKYEISQVVIEMARELTKPNLEKLLNNATNSNIKILKEKLDQTEKFDDFTKKKFIDKIENSVVFRNKLFLWFEQDRKDPYTQLDIKINEIEDETEIDHVIPYSKSADDSWFNKLLVKKSTNQLKKNKTVWEYYQNESDPEAKWNKFVAWAKRIYLVQKSDKESKDNSEKNSIFKNKKPNLKFKNITKKLFDPYKDLGFLARNLNDTRYATKVFRDQLNNYSKHHSKDDENKLFKVVCMNGSITSFLRKSMWRKNEEQVYRFNFWKKDRDQFFHHAVDASIIAIFSLLTKTLYNKLRVYESYDVQRREDGVYLINKETGEVKKADKDYWKDQHNFLKIRENAIEIKNVLNNVDFQNQVRYSRKANTKLNTQLFNETLYGVKEFENNFYKLEKVNLFSRKDLRKFILEDLNEESEKNKKNENGSRKRILTEKYIVDEILQILENEEFKDSKSDINALNKYMDSLPSKFSEFFSQDFINKCKKENSLILTFDAIKHNDPKKVIKIKNLKFFREDATLKNKQAVHKDSKNQIKSFYESYKCVGFIWLKNKNDLEESIFVPINSRVIHFGDKDKDIFDFDSYNKEKLLNEINLKRPENKKFNSINEIEFVKFVKPGALLLNFENQQIYYISTLESSSLRAKIKLLNKMDKGKAVSMKKITNPDEYKIIEHVNPLGINLNWTKKLENNN

SEQ ID NO: 1083 - protein, 1401 aa, Myroides injenensis
MKRILGLDLGTTSIGWAYVHEAENVNETSSIQKVGVRVNPLTTEEQTNFEKGKPITTNASRTLARSARRNLQRYKLRRDNLIQILKENNWINNTTSLTETGNHSTFETYELRNKAASEKLTLDQLSRVLLMLNKKRGYKSSRKVNSKEEGQLIDGMEVAKKLYHEQLTPGQLSLQLMNQGVKKLPDYYRSDLNQELESIWNFQQQFYPNILTDKFKEEINGKGLTSTSSAFWNIYNFNTAENKGSRDEKKKQALQWRSEALSKQLSKEIVAYIIADLNGQIYNSSGYLGAISDRSKELYFNNLTVGQYLFKQLKSNPHTSLKNQVFYRQDYLNEFEKIWETQSKFYPKELTAALKREIRDVIIFYQRKLKSQKGLISFCEFEQKQKTINGKTKTIGHRVIPKSSPLFQEFKIWQQLHNVVLRNKKTNEIVSLADEQKVHLFEELNLKGKLKSNQVLKLIENKPKDWELNYTELEGNNTNKALYNAYLDILDIEGYDVRNELKVKLNKDDIELSDLDVNASEIKEMIFSVFKHLGINTEILEFDATLEDKVFEKQASYQLWHLLYSYEEDNSPTGLDRLYNLLHKKFGFKLNHAKLIGNVLFQDDYGSLSSKAIKNIFPYITENNYYTACELAGYKHSKHSLTKEENETRELKNRLTILPKNSLRNPVVEKIINQMINVVNTLIDEENNILIAQGKEPNFQFDEIRIELARELKKNAKEREELTKSINKSKTDHEKIIKILQKEDGIKNPTRNDIVRFKLYSELKNNGYKDLYTNEYIERKDIFTKEYDIEHIIPQSKLFDDSFSNKTLVRRNVNLKKGNQTAYDFILCEYGQEKANEFETRITNLYNLGKDEGISKSKFKKLLMQESEIGNGFIERDLRETQYIAKKAKSLLLEITRNVISTSGSITDRLREDWGLINVMKELNLQKYRDAGLTEFVKMKDGNKKEVIIDWTKRNDHRHHAMDALTIAFTKHNHIQYLNHLNARKNVNNELHNNIIAIEKLETTLVSDERGNKKRIFKEPIANFRTIAKSHLEAILVSHKAKNKVVTKNINKISGKKISQQTLTPRGQLHKETIYGKIRQYVSKQEKVGPKFTIEVIEQVSNPTYRNLLLKRLEENNNDPKKAFGGKNSLNKNPIYINLEKNIKVPEVLKLVWLEDNYTIRKEISPDLKIDKVIDQGVKQILQNRLAQYKGDSKLAFSNLDANPIWLNEDKGIAIKRVTISGIATAQPLHRKKDHLGQPILDHNGQEIPVDFISTGNNHHVAIYEDENGKLQESVVSHFEAVERVNQKLPIIDKTFNQHLGWKFLFTMKQNELFLFPSDDFNPNEIDLFDKQNYTVISKHLFRIQKLSTKDYSFRHHLETNVEEIKDLKTITWRREGLNGIQNIIKVRTNHLGEIIHIGEY

SEQ ID NO: 1084 - protein, 1466 aa, Myroides odoratus
MKNILGLDLGTNSIGWALVKEDFENKQGEILGLGSRIIPMSQDILGEFGRGNSISQTADRTGYRGVRRLRERHLLRRERLHRVLNILGFLPNHYAKEIDFTKRLGKFINHAEPKLSFDKEFIFKDSFNEMLKDFQQNQPGFIINKHGEEALVPYDWTIYYLRKKALTQKIDKEELAWILLNFNQKRGYYQLRGEEEEENTNKLVEFYSLKIIDVIADNEVNKKGEVWYSLHLENGWIYRRSSKISLVDWKDKVRDFIVTTDVNDDGSEKLDKDGVVKRSFRAPSADDWTLLKKKTEQDIDNSNKTVGAYIYENLLLNPKQKIKGKLVRTIERKFYKDELKQILEKQKEFHQELQNEQLLQDCVRELYKYNEQHQQMLESKDFVHLFLNDIIFYQRPLRSQKSLISNCTLEKRVSRDGVVFPIKVISKSNPYYQEFRLLQWLQNLAIYRKDDDVNVTQEFLNSIESWENLLQFLNAKKEIKQEQLIKFLLEQKGLKGNSLKTAILTYRWNYVTDKVYPMNETRSLIQDKLKKVENVATDFLSFDNEMALWHIIYSVNDKIEYEKALAKFASKHNLDEISFVESFKKFPPFKSDYGSFSEKAIKKLLPLMRFGSVWNKNNIVPSVLDRIDKILTGEYDEKIKIRVREKAEQFQLNQIEDFQNLPLWLAQYVVYDRHSEAEIAGKWNSVKDLENYLKEFKQHSLRNPIVEQIITETLRVVKDIWQQYGNGVQNFFDEIHIELGREMKNTADERKRITNSVTENENTNLRIKALLVELKEDTNIENVRPHSPMQQEILKIYEEGVLNAVENIDEDILKISKTAQPSKSELIRYKLWLEQKYQSPYTGEMIPLSRLFTSDYEIEHVIPQSRYFDDSLSNKVICEAAVNKRKDNQLGLEFIKNHHSEKIELGNGRTAQVLEVEAYESFVKKNYDKNRGKRNKLLLEDVPEKMIERQLNDTRYISKFVTHLLSNIVRKDEVNSKDDGINSKNIIPGNGKITSQLKQDWGLNDVWNELILPRFERMNNLTNSTDFTSTNTNGKIIPTVPLEYSKGFSKKRIDHRHHALDALVIALATRDHVNLLNNESALPKKDRTKEEQKSFRFDLQVNLRNKEKYFNVKEGREKEKFTTFKKPWNTLTQDTRDALENMVVSFKQNLRVINKATNYYESYTDENGNLRLDKYGNPKKELISQKGTNWAIRKSLHKETVSGQIHLDRVKVTKGKIVTATRKSLDSSFNEKSIESITDTGIQKILRNYLKAKDNKPDVAFSPEGIEELNKSISVYNEGKNHQPIIKVRIFEQGSKFPVGETGNKIAKFVEAAKGTNLFFGIYQDKTGKRSYDTIPLNLVIERLKQGLSPVPETNEKGHQLLFHLSPNDLVYVPTIDDNEQLDSNRVYKFTDSSDTTCNFIPSNISAIIFNINSKEQEKRGINYPIQNELGVGSPQSKNQKSFDGFMIKEVCIKLKVDRLGNISKT

SEQ ID NO: 1085 - protein, 241 aa, Neisseria lactamica
MAAFKPNPMNYILGLDIGIASVGWAMVEIDKEENPIRLIDLGVRVFERAEMPKTGDSLAMARRLARSVRRLTRRRAHRLLRARRLLKREGVLQDADFDENGLVKSLPNTPWQLRAAALDRKLTCLEWSAVLLHLIKHRGYLSQRKNEGETADKELGALLKGVADNAHALQTGDFRTPAELALNKFEKESGHIRNQRGDYSHTFSRKDLQAELNLLFEKQKEFGNPHVSDGLKEGIETLLMA

SEQ ID NO: 1086 - protein, 666 aa, Neisseria lactamica
MAAFKPNPMNYILGLDIGIASVGWAMVEVDEEENPIRLIDLGVRVFERAEVPKTGDSLAMARRLARSVRRLTRRRAHRLLRARRLLKREGVLQDADFDENGLVKSLPNTPWQLRAAALDRKLTCLEWSAVLLHLVKHRGYLSQRKNEGETADKELGALLKGVADNAHALQTGDFRTPAELALNKFEKESGHIRNQRGDYSHTFSRKDLQAELNLLFEKQKEFGNPHVSDGLKEDIETLLMAQRPALSGDAVQKMLGHCTFEPAEPKAAKNTYTAERFIWLTKLNNLRILEQGSERPLTDTERATLMDEPYRKSKLTYAQARKLLGLEDTAFFKGLRYGKDNAEASTLMEMKAYHAISRALEKEGLKDKKSPLNLSTELQDEIGTAFSLFKTDKDITGRLKDRVQPEILEALLKHISFDKFVQISLKALRRIVPLMEQGKRYDEACAEIYGDHYCKKNAEEKIYLPPIPADEIRNPVVLRALSQARKVINCVVRRYGSPARIHIETAREVGKSFKDRKEIEKRQEENRKDREKAAAKFREYFPNFVGEPKSKDILKLRLYEQQHGKCLYSGKEINLVRLNEKGYVEIDHALPFSRTWDDSFNNKVLVLGSENQNKGNQTPYEYFNGKDNSREWQEFKARVETSRFPRSKNNGFCCKNSMKKDLKNAT

SEQ ID NO: 1087 - protein, 828 aa, Neisseria lactamica
MLGHCTFEPAEPKAAKNTYTAERFIWLTKLNNLRILEQGSERPLTDTERATLMDEPYRKSKLTYAQARKLLGLEDTAFFKGLRYGKDNAEASTLMEMKAYHAISRALEKEGLKDKKSPLNLSTELQDEIGTAFSLFKTDKDITGRLKDRVQPEILEALLKHISFDKFVQISLKALRRIVPLMEQGKRYDEACAEIYGDHYGKKNTEEKIYLPPIPADEIRNPVVLRALSQARKVINAVVRRYDSPARIHIETAREVGKSFKDRKEIEKRQEENRKDREKAAAKFREYFPNFVGEPKSKDILKLRLYEQQHGKCLYSGKEINLVRLNEKGYVEIDHALPFSRTWDDSFNNKVLVLGSENQNKGNQTPYEYFNGKDNSREWQEFKARVETSRFPRSKKQRILLQKFDEEGFKERNLNDTRYVNRFLCQFVADHILLTGKGKRRVFASNGQITNLLRGFWGLRKVRAENDRHHALDAVVVACSTVAMQQKITRFVRYKEMNAFDGKTIDKETGEVLHQKAHFPQPWEFFAQEVMIRVFGKPDGKPEFEEADTSEKLRTLLAEKLSSRPEAVHEYVTPLFVSRAPNRKMSGQGHMETVKSAKRLDEGISVLRVPLTQLKLKDLEKMVNREREPKLYDALKAQLETHKDDPAKAFAEPFYKYDKAGSRTQQVKAVRIEQVQKTGVWVRNHNGIADNATMVRVDVFEKGGKYYLVPIYSWQVAKGILPDRAVVAFKDEEDWTVMDDSFEFRFVLYANDLIKAELKKETFFGYFSGLDRSTGNISLRSHDLDKTKGKDGVYRIGIKTALSFQKHQIDELGKEIRPCRLKKRPPVR

SEQ ID NO: 1088 - protein, 408 aa, Neisseria lactamica
MNDTRYVNRFLCQFVADHILLTGKGKRRVFASNGQITNLLRGFWGLRKVRTENDRHHALDAVVVACSTVAMQQKITRFVRYKEMNAFDGKTIDKETGEVLHQKAHFPQPWEFFAQEVMIRVFGKPDGKPEFEEADTPEKLRTLLAEKLSSRPEAVHEYVTPLFVSRAPNRKMSGQGHMETVKSAKRLDEGISVLRVPLTQLKLKGLEKMVNREREPKLYDALKAQLETHKDDPAKAFAEPFYKYDKAGSRTQQVKAVRIEQVQKTGVWVRNHNGIADNATMVRVDVFEKGGKYYLVPIYSWQVAKGILPDRAVVAFKDEEDWTVMDDSFEFRFVLYANDLIKLTAKKNEFLGYFVSLNRATGAIDIRTHDTDSTKGKNGIFQSVGVKTALSFQKTKSTNSAKKSDHAV

SEQ ID NO: 1089 - protein, 1082 aa, Neisseria meningitidis
MAAFKPNPINYILGLDIGIASVGWAMVEIDEDENPICLIDLGVRVFERAEVPKTGDSLAAARRLARSVRRLTRRRAHRLLRARRLLKREGVLQAADFDENGLIKSLPNTPWQLRAAALDRKLTPLEWSAVLLHLIKHRGYLSQRKNEGETADKELGALLKGVADNAHALQTGDFRTPAELALNKFEKESGHIRNQRGDYSHTFSRKDLQAELILLFEKQKEFGNPHVSGGLKEGIETLLMTQRPALSGDAVQKMLGHCTFEPAEPKAAKNTYTAERFIWLTKLNNLRILEQGSERPLTDTERATLMDEPYRKSKLTYAQARKLLGLEDTAFFKGLRYGKDNAEASTLMEMKAYHAISRALEKEGLKDKKSPLNLSPELQDEIGTAFSLFKTDEDITGRLKDRVQPEILEALLKHISFDKFVQISLKALRRIVPLMEQGKRYDEACAEIYGDHYGKKNTEEKIYLPPIPADEIRNPVVLRALSQARKVINGVVRRYGSPARIHIETAREVGKSFKDRKEIEKRQEENRKDREKAAAKFREYFPNFVGEPKSKDILKLRLYEQQHGKCLYSGKEINLGRLNEKGYVEIDHALPFSRTWDDSFNNKVLVLGSENQNKGNQTPYEYFNGKDNSREWQEFKARVETSRFPRSKKQRILLQKFDEDGFKERNLNDTRYVNRFLCQFVADRMRLTGKGKKRVFASNGQITNLLRGFWGLRKVRAENDRHHALDAVVVACSTVAMQQKITRFVRYKEMNAFDGKTIDKETGEVLHQKTHFPQPWEFFAQEVMIRVFGKPDGKPEFEEADTPEKLRTLLAEKLSSRPEAVHEYVTPLFVSRAPNRKMSGQGHMETVKSAKRLDEGVSVLRVPLTQLKLKDLEKMVNREREPKLYEALKARLEAHKDDPAKAFAEPFYKYDKAGNRTQQVKAVRVEQVQKTGVWVRNHNGIADNATMVRVDVFEKGDKYYLVPIYSWQVAKGILPDRAVVQGKDEEDWQLIDDSFNFKFSLHPNDLVEVITKKARMFGYFASCHRGTGNINIRIHDLDHKIGKNGILEGIGVKTALSFQKYQIDELGKEIRPCRLKKRPPVR

SEQ ID NO: 1090 - protein, 976 aa, Neisseria meningitidis
MAAFKPNPINYILGLDIGIASVGWAMVEIDEDENPICLIDLGVRVFERAEVPKTGDSLAAARRLARSVRRLTRRRAHRLLRARRLLKREGVLQAADFDENGLIKSLPNTPWQLRAAALDRKLTPLEWSAVLLHLIKHRGYLSQRKNEGETADKELGALLKGVADNAHALQTGDFRTPAELALNKFEKESGHIRNQRGDYSHTFSRKDLQAELILLFEKQKEFGNPHVSGGLKEGIETLLMTQRPALSGDAVQKMLGHCTFEPAEPKAAKNTYTAERFIWLTKLNNLRILEQGSERPLTDTERATLMDEPYRKSKLTYAQARKLLGLEDTAFFKGLRYGKDNAEASTLMEMKAYHAISRALEKEGLKDKKSPLNLSPELQDEIGTAFSLFKTDEDITGRLKDRIQPEILEALLKHISFDKFVQISLKALRRIVPLMEQGKRYDEACAEIYGDHYGKKNTEEKIYLPPIPADEIRNPVVLRALSQARKVINGVVRRYGSPARIHIETAREVGKSFKDRKEIEKRQEENRKDREKAAAKFREYFPNFVGEPKSKDILKLRLYEQQHGKCLYSGKEINLGRLNEKGYVEIDHALPFSRTWDDSFNNKVLVLGSENQNKGNQTPYEYFNGKDNSREWQEFKARVETSRFPRSKKQRILLQKFDEDGFKERNLNDTRYVNRFLCQFVADRMRLTGKGKKRVFASNGQITNLLRGFWGLRKVRAENDRHHALDAVVVACSTVAMQQKITRFVRYKEMNAFDGKTIDKETGEVLHQKTHFPQPWEFFAQEVMIRVFGKPDGKPEFEEADTPEKLRTLLAEKLSSRPEAVHEYVTPLFVSRAPNRKMSGQGHMETVKSAKRLDEGVSVLRVPLTQLKLKDLEKMVNREREPKLYEALKARLEAHKDDPAKAFAEPFYKYDKAGNRTQQVKAVRVEQVQKTGVWVRNHNGIADNATMVRVDVFEKGDKYYLVPIYSWQVAKGIFAG

SEQ ID NO: 1091 - protein, 1081 aa, Neisseria meningitidis
MAAFKPNPINYILGLDIGIASVGWAMVEIDEDENPICLIDLGVRVFERAEVPKTGDSLAAARRLARSVRRLTRRRAHRLLRARRLLKREGVLQAADFDENGLIKSLPNTPWQLRSAALDRKLTPLEWSAVLLHLIKHRGYLSQRKNEGETADKELGALLKGVADNAHALQTGDFRTPAELALNKFEKESGHIRNRRGDYSHTFSRKDLQAELDLLFEKQKEFGNPHISDDLKEGIETLLMTQRPALSGDAVQKMLGHCTFEPTEPKAAKNTYTAERFVWLTKLNNLRILEQGSERPLTDTERATLMDEPYRKSKLTYAQARKLLELDDTAFFKGLRYGKDNAEASTLMEMKAYHAISRALEKEGLKDKKSPLNLSPELQDEIGTAFSLFKTDEDITGRLKDRVQPEILEVLLKHISFDKFVQISLKALRRIVPLMEQGKRYDEACAEIYGDHDGKKNTEEKIYLPPIPADEIRNPVVLRALSQARKVINAVVRRYGSPARIHIETAREVGKSFKDRKEIEKRQEENRKDREKAAAKFREYFPNFVGEPKSKDILKLRLYEQQHGKCLYSGKEINLGRLNEKGYVEIDHALPFSRTWDDSFNNKVLVLGSENQNKGNQTPYEYFNGKDNSREWQEFKARVETSRFPRSKKQRILLQKFDEEGFKERNLNDTRYVNRFLCQFVADHMLLTGKGKRRVFASNGQITNLLRGFWGLRKVRAENNRHHALDAVVVACSTVAMQQKITRFVRYKEMNAFDGKTIDKETGEVLHQKTHFPQPWEFFAQEVMIRVFGKPDGKPEFEEADTPEKLRTLLAEKLSSRPEAVHEYVTPLFVSRAPNRKMSGQGHMETVKSAKRLDEGVSVLRVPLTQLKLKDLEKMVNREREPKLYEALKARLEAHKDDPAKAFAEPFYKYDKAGNRTQQVKAVRVEQVQKTGVWVRNHNGIADNATMVRVDVFEKAGKYYLVPIYSWQVAKGILPDRAVVAYADEEGWTVIDESFRFKFVLYSNDLIKVQLKKDSFLGYFSGLDRATGAISLREHDLEKSKGKDGMHRIGVKTALSFQKYQIDEMGKEIRLCRLKKRPPVR

SEQ ID NO: 1092 - protein, 1081 aa, Neisseria meningitidis
MAAFKPNPINYILGLDIGIASVGWAMVEIDEDENPICLIDLGVRVFERAEVPKTGDSLAAARRLARSVRRLTRRRAHRLLRARRLLKREGVLQAADFDENGLIKSLPNTPWQLRSAALDRKLTPLEWSAVLLHLIKHRGYLSQRKNEGETADKELGALLKGVANNAHALQTGDFRTPAELALNKFEKESGHIRNQRGDYSHTFSRKDLQAELILLFEKQKEFGNPHVSGGLKEGIETLLMTQRPALSGDAVQKMLGHCTFEPAEPKAAKNTYTAERFIWLTKLNNLRILEQGSERPLTDTERATLMDEPYRKSKLTYAQARKLLGLEDTAFFKGLRYGKDNAEASTLMEMKAYHAISRALEKEGLKDKKSPLNLSPELQDEIGTAFSLFKTDEDITGRLKDRIQPEILEALLKHISFDKFVQISLKALRRIVPLMEQGKRYDEACAEIYGDHYGKKNTEEKIYLPPIPADEIRNPVVLRALSQARKVINGVVRRYGSPARIHIETAREVGKSFKDRKEIEKRQEENRKDREKAAAKFREYFPNFVGEPKSKDILKLRLYEQQHGKCLYSGKEINLGRLNEKGYVEIDHALPFSRTWDDSFNNKVLVLGSENQNKGNQTPYEYFNGKDNSREWQEFKARVETSRFPRSKKQRILLQKFDEDGFKERNLNDTRYVNRFLCQFVADRMRLTGKGKKRVFASNGQITNLLRGFWGLRKVRAENDRHHALDAVVVACSTVAMQQKITRFVRYKEMNAFDGKTIDKETGEVLHQKTHFPQPWEFFAQEVMIRVFGKPDGKPEFEEADTPEKLRTLLAEKLSSRPEAVHEYVTPLFVSRAPNRKMSGQGHMETVKSAKRLDEGVSVLRVPLTQLKLKDLEKMVNREREPKLYEALKARLEAHKDDPAKAFAEPFYKYDKAGNRTQQVKAVRVEQVQKTGVWVRNHNGIADNATMVRVDVFEKAGKYYLVPIYSWQVAKGILPDRAVVAYADEEGWTVIDESFRFKFVLYSNDLIKVQLKKDSFLGYFSGLDRATGAISLREHDLEKSKGKDGMHRIGVKTALSFQKYQIDEMGKEIRLCRLKKRPPVR

SEQ ID NO: 1093 - protein, 1082 aa, Neisseria meningitidis
MAAFKPNPINYILGLDIGIASVGWAMVEIDEDENPICLIDLGVRVFERAEVPKTGDSLAMARRLARSVRRLTRRRAHRLLRARRLLKREGVLQAADFDENGLIKSLPNTPWQLRAAALDRKLTPLEWSAVLLHLIKHRGYLSQRKNEGETADKELGALLKGVADNAHALQTGDFRTPAELALNKFEKESGHIRNQRGDYSHTFSRKDLQAELILLFEKQKEFGNPHVSGGLKEGIETLLMTQRPALSGDAVQKMLGHCTFEPAEPKAAKNTYTAERFIWLTKLNNLRILEQGSERPLTDTERATLMDEPYRKSKLTYAQARKLLGLEDTAFFKGLRYGKDNAEASTLMEMKAYHAISRALEKEGLKDKKSPLNLSPELQDEIGTAFSLFKTDEDITGRLKDRIQPEILEALLKHISFDKFVQISLKALRRIVPLMEQGKRYDEACAEIYGDHYGKKNTEEKIYLPPIPADEIRNPVVLRALSQARKVINGVVRRYGSPARIHIETAREVGKSFKDRKEIEKRQEENRKDREKAAAKFREYFPNFVGEPKSKDILKLRLYEQQHGKCLYSGKEINLGRLNEKGYVEIDHALPFSRTWDDSFNNKVLVLGSENQNKGNQTPYEYFNGKDNSREWQEFKARVETSRFPRSKKQRILLQKFDEDGFKERNLNDTRYVNRFLCQFVADRMRLTGKGKKRVFASNGQITNLLRGFWGLRKVRAENDRHHALDAVVVACSTVAMQQKITRFVRYKEMNAFDGKTIDKETGEVLHQKTHFPQPWEFFAQEVMIRVFGKPDGKPEFEEADTPEKLRTLLAEKLSSRPEAVHEYVTPLFVSRAPNRKMSGQGHMETVKSAKRLDEGVSVLRVPLTQLKLKDLEKMVNREREPKLYEALKARLEAHKDDPAKAFAEPFYKYDKAGNRTQQVKAVRVEQVQKTGVWVRNHNGIADNATMVRVDVFEKGDKYYLVPIYSWQVAKGILPDRAVVQGKDEEDWQLIDDSFNFKFSLHPNDLVEVITKKARMFGYFASCHRGTGNINIRIHDLDHKIGKNGILEGIGVKTALSFQKYQIDELGEEIRPCRLKKRPPVR

SEQ ID NO: 1094 - protein, 1082 aa, Neisseria meningitidis
MAAFKPNPINYILGLDIGIASVGWAMVEIDEDENPICLIDLGVRVFERAEVPKTGDSLAMARRLARSVRRLTRRRAHRLLRARRLLKREGVLQAADFDENGLIKSLPNTPWQLRAAALDRKLTPLEWSAVLLHLIKHRGYLSQRKNEGETADKELGALLKGVADNAHALQTGDFRTPAELALNKFEKESGHIRNQRGDYSHTFSRKDLQAELILLFEKQKEFGNPHVSGGLKEGIETLLMTQRPALSSDAVQKMLGHCTFEPAEPKAAKNTYTAERFIWLTKLNNLRILEQGSERPLTDTERATLMDEPYRKSKLTYAQARKLLGLEDTAFFKGLRYGKDNAEASTLMEMKAYHAISRALEKEGLKDKKSPLNLSPELQDEIGTAFSLFKTDEDITGRLKDRIQPEILEALLKHISFDKFVQISLKALRRIVPLMEQGKRYDEACAEIYGDHYGKKNTEEKIYLPPIPADEIRNPVVLRALSQARKVINGVVRRYGSPARIHIETAREVGKSFKDRKEIEKRQEENRKDREKAAAKFREYFPNFVGEPKSKDILKLRLYEQQHGKCLYSGKEINLGRLNEKGYVEIDHALPFSRTWDDSFNNKVLVLGSENQNKGNQTPYEYFNGKDNSREWQEFKARVETSRFPRSKKQRILLQKFDEDGFKERNLNDTRYVNRFLCQFVADRMRLTGKGKKRVFASNGQITNLLRGFWGLRKVRAENDRHHALDAVVVACSTVAMQQKITRFVRYKEMNAFDGKTIDKETGEVLHQKTHFPQPWEFFAQEVMIRVFGKPDGKPEFEEADTPEKLRTLLAEKLSSRPEAVHEYVTPLFVSRAPNRKMSGQGHMETVKSAKRLDEGVSVLRVPLTQLKLKDLEKMVNREREPKLYEALKARLEAHKDDPAKAFAEPFYKYDKAGNRTQQVKAVRVEQVQKTGVWVRNHNGIADNATMVRVDVFEKGDKYYLVPIYSWQVAKGILPDRAVVQGKDEEDWQLIDDSFNFKFSLHPNDLVEVITKKARMFGYFASCHRGTGNINIRIHDLDHKIGKNGILEGIGVKTALSFQKYQIDELGKEIRPCRLKKRPPVR

SEQ ID NO: 1095 - protein, 1082 aa, Neisseria meningitidis
MAAFKPNPINYILGLDIGIASVGWAMVEIDEDENPICLIDLGVRVFERAEVPKTGDSLAMARRLARSVRRLTRRRAHRLLRARRLLKREGVLQAADFDENGLIKSLPNTPWQLRAAALDRKLTPLEWSAVLLHLIKHRGYLSQRKNEGETADKELGALLKGVADNAHALQTGDFRTPAELALNKFEKESGHIRNQRGDYSHTFSRKDLQAELILLFEKQKEFGNPHVSGGLKEGIETLLMTQRPALSSDAVQKMLGHCTFEPAEPKAAKNTYTAERFIWLTKLNNLRILEQGSERPLTDTERATLMDEPYRKSKLTYAQARKLLGLEDTAFFKGLRYGKDNAEASTLMEMKAYHAISRALEKEGLKDKKSPLNLSPELQDEIGTAFSLFKTDEDITGRLKDRIQPEILEALLKHISFDKFVQISLKALRRIVPLMEQGKRYDEACAEIYGDHYGKKNTEEKIYLPPIPADEIRNPVVLRALSQARKVINGVVRRYGSPARIHIETAREVGKSFKDRKEIEKRQEENRKDREKAAAKFREYFPNFVGEPKSKDILKLRLYEQQHGKCLYSGKEINLGRLNEKGYVEIDHALPFSRTWDDSFNNKVLVLGSENQNKGNQTPYEYFNGKDNSREWQEFKARVETSRFPRSKKQRILLQKFDEDGFKERNLNDTRYVNRFLYQFVADRMRLTGKGKKRVFASNGQITNLLRGFWGLRKVRAENDRHHALDAVVVACSTVAMQQKITRFVRYKEMNAFDGKTIDKETGEVLHQKTHFPQPWEFFAQEVMIRVFGKPDGKPEFEEADTPEKLRTLLAEKLSSRPEAVHEYVTPLFVSRAPNRKMSGQGHMETVKSAKRLDEGVSVLRVPLTQLKLKDLEKMVNREREPKLYEALKARLEAHKDDPAKAFAEPFYKYDKAGNRTQQVKAVRVEQVQKTGVWVRNHNGIADNATMVRVDVFEKGDKYYLVPIYSWQVAKGILPDRAVVQGKDEEDWQLIDDSFNFKFSLHPNDLVEVITKKARMFGYFASCHRGTGNINIRIHDLDHKIGKNGILEGIGVKTALSFQKYQIDELGKEIRPCRLKKRPPVR

SEQ ID NO: 1096 - protein, 1081 aa, Neisseria meningitidis
MAAFKPNPINYILGLDIGIASVGWAMVEIDEDENPICLIDLGVRVFERAEVPKTGDSLAMARRLARSVRRLTRRRAHRLLRARRLLKREGVLQAADFDENGLIKSLPNTPWQLRAAALDRKLTPLEWSAVLLHLIKHRGYLSQRKNEGETADKELGALLKGVADNAHALQTGDFRTPAKLALNKFEKESGHIRNQRGDYSHTFSRKDLQAELNLLFEKQKEFGNPHISDGLKEGIETLLMTQRPALSGDAVQKMLGHCTFEPTEPKAAKNTYTAERFVWLTKLNNLRILEQGSEQPLTDTQRAKLMDEPYRKSKLTYAQARKLLGLEDTAFFKGLRYGKDNAEASTLMEMKAYHAISRALEKEGLKDKKSPLNLSPELQDEIGTAFSLFKTDEDITGRLKDRVQPEILEALLKHISFDKFVQISLKALRRIVPLMEQGKRYNEACAEIYGDHYGKKNTEEKIYLPPIPADEIRNPVVLRALSQARKVINGVVRRYGSPARIHIETAREVGKSFKDRKEIEKRQEENRKDREKAAAKFQEYFPNFVGEPKSKDILKLRLYEQQHGKCLYSGKEINLGRLNEKGYVEIDHALPFSRTWDDSFNNKVLVLGSENQNKGNQTPYEYFNGKDNSREWQEFKARVETSRFPRSKKQRILLQKFDEDGFKERNLNDTRYVNRFLCQFVADRMRLTGKGKKRVFASNGQITNLLRGFWGLRKVRAENDRHHALDAVVVACSTVAMQQKITRFVRYKEMNAFDGKTIDKETGEVLHQKTHFPQPWEFFAQEVMIRVFGKPDGKPEFEEADTPEKLRTLLAEKLSSRPEAVHEYVTPLFVSRAPNRKMSGQGHMETVKSAKRLDEGVSVLRVPLTQLKLKDLEKMVNREREPKLYEALKARLEAHKDDPAKAFAEPFYKYDKAGNRTQQVKAVRVEQVQKTGVWVRNHNGIADNATMVRVDVFEKGDKYYLVPIYSWQVAKGILPDRAVVAYADEEDWTVIDESFRFKFVLYSNDLIKVQLKKDSFLGYFSGLDRATGAISLREHDLEKSKGKDGMHRIGVKTALSFQKYQIDEMGKEIRPCRLKKRPPVR

SEQ ID NO: 1097 - protein, 1081 aa, Neisseria meningitidis
MAAFKPNPINYILGLDIGIASVGWAMVEIDEEENPIRLIDLGVRVFERAEVPKTGDSLAMARRLARSVRRLTRRRAHRLLRARRLLKREGVLQAADFDENGLIKSLPNTPWQLRAAALDRKLTPLEWSAVLLHLIKHRGYLSQRKNEGETADKELGALLKGVADNAHALQTGDFRTPAELALNKFEKECGHIRNQRGDYSHTFSRKDLQAELNLLFEKQKEFGNPHVSGGLKEGIETLLMTQRPALSGDAVQKMLGHCTFEPAEPKAAKNTYTAERFIWLTKLNNLRILEQGSERPLTDTERATLMDEPYRKSKLTYAQARKLLSLEDTAFFKGLRYGKDNAEASTLMEMKAYHTISRALEKEGLKDKKSPLNLSPELQDEIGTAFSLFKTDEDITGRLKDRIQPEILEALLKHISFDKFVQISLKALRRIVPLMEQGKRYDEACAEIYGDHYGKKNTEEKIYLPPIPADEIRNPVVLRALSQARKVINGVVRRYGSPARIHIETAREVGKSFKDRKEIEKRQEENRKDREKAAAKFREYFPNFVGEPKSKDILKLRLYEQQHGKCLYSGKEINLGRLNEKGYVEIDHALPFSRTWDDSFNNKVLVLGSENQNKGNQTPYEYFNGKDNSREWQEFKARVETSRFPRSKKQRILLQKFDEDGFKERNLNDTRYVNRFLCQFVADRMRLTGKGKKRVFASNGQITNLLRGFWGLRKVRAENDRHHALDAVVVACSTVAMQQKITRFVRYKEMNAFDGKTIDKETGEVLHQKTHFPQPWEFFAQEVMIRVFGKPDGKPEFEEADTPEKLRTLLAEKLSSRPEAVHEYVTPLFVSRAPNRKMSGQGHMETVKSAKRLDEGVSVLRVPLTQLKLKDLEKMVNREREPKLYEALKARLEAHKDDPAKAFAEPFYKYDKAGNRTQQVKAVRVEQVQKTGVWVRNHNGIADNATMVRVDVFEKGDKYYLVPIYSWQVAKGILPDRAVVAYADEEDWTVIDESFRFKFVLYSNDLIKVQLKKDSFLGYFSGLDRATGAISLREHDLEKSKGKDGMHRIGVKTALSFQKYQIDEMGKEIRPCRLKKRPPVR

SEQ ID NO: 1098 - protein, 1082 aa, Neisseria meningitidis
MAAFKPNPINYILGLDIGIASVGWAMVEIDEEENPIRLIDLGVRVFERAEVPKTGDSLAMARRLARSVRRLTRRRAHRLLRARRLLKREGVLQAADFDENGLIKSLPNTPWQLRAAALDRKLTPLEWSAVLLHLIKHRGYLSQRKNEGETADKELGALLKGVADNAHALQTGDFRTPAELALNKFEKECGHIRNQRGDYSHTFSRKDLQAELNLLFEKQKEFGNPHVSGGLKEGIETLLMTQRPALSGDAVQKMLGHCTFEPAEPKAAKNTYTAERFIWLTKLNNLRILEQGSERPLTDTERATLMDEPYRKSKLTYAQARKLLGLEDTAFFKGLRYGKDNAEASTLMEMKAYHAISRALEKEGLKDKKSPLNLSPELQDEIGTAFSLFKTDEDITGRLKDRIQPEILEALLKHISFDKFVQISLKALRRIVPLMEQGKRYDEACAEIYGDHYGKKNTEEKIYLPPIPADEIRNPVVLRALSQARKVINGVVRRYGSPARIHIETAREVGKSFKDRKEIEKRQEENRKDREKAAAKFREYFPNFVGEPKSKDILKLRLYEQQHGKCLYSGKEINLVRLNEKGYVEIDHALPFSRTWDDSFNNKVLVLGSENQNKGNQTPYEYFNGKDNSREWQEFKARVETSRFPRSKKQRILLQKFDEEGFKERNLNDTRYVNRFLCQFVADHILLTGKGKRRVFASNGQITNLLRGFWGLRKVRAENDRHHALDAVVVACSTVAMQQKITRFVRYKEMNAFDGKTIDKETGEVLHQKTHFPQPWEFFAQEVMIRVFGKPDGKPEFEEADTPEKLRTLLAEKLSSRPEAVHEYVTPLFVSRAPNRKMSGQGHMETVKSAKRLDEGVSVLRVPLTQLKLKDLEKMVNREREPKLYEALKARLEAHKDDPAKAFAEPFYKYDKAGNRTQQVKAVRVEQVQKTGVWVRNHNGIADNATMVRVDVFEKGGKYYLVPIYSWQVAKGILPDRAVVQGKDEEDWQLIDDSFNFKFSLHPNDLVEVITKKARMFGYFASCHRGTGNINIRIHDLDHKIGKNGILEGIGVKTALSFQKYQIDELGKEIRPCRLKKRPPVR

SEQ ID NO: 1099 - protein, 1081 aa, Neisseria meningitidis
MAAFKPNPINYILGLDIGIASVGWAMVEIDEEENPIRLIDLGVRVFERAEVPKTGDSLAMARRLARSVRRLTRRRAHRLLRARRLLKREGVLQAADFDENGLIKSLPNTPWQLRAAALDRKLTPLEWSAVLLHLIKHRGYLSQRKNEGETADKELGALLKGVADNAHALQTGDFRTPAELALNKFEKESGHIRNQRGDYSHTFSRKDLQAELILLFEKQKEFGNPHVSGGLKEGIETLLMTQRPALSGDAVQKMLGHCTFEPAEPKAAKNTYTAERFIWLTKLNNLRILEQGSERPLTDTERATLMDEPYRKSKLTYAQARKLLGLEDTAFFKGLRYGKDNAEASTLMEMKAYHAISRALEKEGLKDKKSPLNLSPELQDEIGTAFSLFKTDEDITGRLKDRVQPEILEALLKHISFDKFVQISLKALRRIVPLMEQGKRYDEACAEIYGDHYGKKNTEEEIYLPPITADEIRNPVVLRALSQARKVINAVVRRYGSPARIHIETAREVGKSFKDRKEIEKRQEENRKDREKAAAKFREYFPNFVGEPKSKDILKLRLYEQQHGKCLYSGKEINLVRLNEKGYVEIDHALPFSRTWDDSFNNKVLVLGSENQNKGNQTPYEYFNGKENSREWQEFKARVETSRFPRSKKQRILLQKFDEDGFKERNLNDTRYVNRFLCQFVADRMRLTGKGKKRVFASNGQITNLLRGFWGLHKVRAENDRHHALDAVVVACSTIAMQQKITRFVRYKEMNAFDGKTIDKETGEVLHQKAHFPQPWEFFAQEVMIRVFGKPDGKPEFEEADTPEKLRTLLAEKLSSRPEAVHEYVTPLFVSRAPNRKMSGQGHMETVKSAKRLDEGISVLRVPLTQLKLKDLEKMVNRAREPKLYEALKARLEAHKDDPAKAFAEPFYKYDKAGNRTQQVKAVRVEQVQKTGVWVRNHNGIADNATMVRVDVFEKAGKYYLVPIYSWQVAKGILPDRAVVAYADEEDWTVIDESFRFKFVLYSNDLIKVQLKKDSFLGYFSGLDRATGAISLREHDLEKSKGKDGMHRIGVKTALSFQKYQIDEMGKEIRPCRLKKRPPVR

SEQ ID NO: 1100 - protein, 1082 aa, Neisseria meningitidis
MAAFKPNPINYILGLDIGIASVGWAMVEIDEEENPIRLIDLGVRVFERAEVPKTGDSLAMARRLARSVRRLTRRRAHRLLRARRLLKREGVLQAADFDENGLIKSLPNTPWQLRAAALDRKLTPLEWSAVLLHLIKHRGYLSQRKNEGETADKELGALLKGVANNAHALQTGDFRTPAELALNKFEKESGHIRNQRGDYSHTFSRKDLQAELILLFEKQKEFGNPHVSGGLKEGIETLLMTQRPALSGDAVQKMLGHCTFEPAEPKAAKNTYTAERFIWLTKLNNLRILEQGSERPLTDTERATLMDEPYRKSKLTYAQARKLLGLEDTAFFKGLRYGKDNAEASTLMEMKAYHAISRALEKEGLKDKKSPLNLSSELQDEIGTAFSLFKTDEDITGRLKDRVQPEILEALLKHISFDKFVQISLKALRRIVPLMEQGKRYDEACAEIYGDHYGKKNTEEKIYLPPIPADKIRNPVVLRALSQARKVINGVVRRYGSPARIHIETAREVGKSFKDRKEIEKRQEENRKDREKAAAKFREYFPNFVGEPKSKDILKLRLYEQQHGKCLYSGKEINLVRLNEKGYVEIDHALPFSRTWDDSFNNKVLVLGSENQNKGNQTPYEYFNGKDNSREWQEFKARVETSRFPRSKKQRILLQKFDEDGFKECNLNDTRYVNRFLCQFVADHILLTGKGKRRVFASNGQITNLLRGFWGLRKVRAENDRHHALDAVVVACSTVAMQQKITRFVRYKEMNAFDGKTIDKETGKVLHQKTHFPQPWEFFAQEVMIRVFGKPDGKPEFEEADTPEKLRTLLAEKLSSRPEAVHEYVTPLFVSRAPNRKMSGAHKDTLRSAKRFVKHNEKISVKRVWLTEIKLADLENMVNYKNGREIELYEALKARLEAYGGNAKQAFDPKDNPFYKKGGQLVKAVRVEKTQESGVLLNKKNAYTIADNGDMVRVDVFCKVDKKGKNQYFIVPIYAWQVAENILPDIDCKGYRIDDSYTFCFSLHKYDLIAFQKDEKSKVEFAYYINCDSSNGRFYLAWHDKGSKEQQFRISTQNLVLIQKYQVNELGKEIRPCRLKKRPPVR

SEQ ID NO: 1101 - protein, 1082 aa, Neisseria meningitidis
MAAFKPNPINYILGLDIGIASVGWAMVEIDEEENPIRLIDLGVRVFERAEVPKTGDSLAMARRLARSVRRLTRRRAHRLLRARRLLKREGVLQAADFDENGLIKSLPNTPWQLRAAALDRKLTPLEWSAVLLHLIKHRGYLSQRKNEGETADKELGALLKGVANNAHALQTGDFRTPAELALNKFEKESGHIRNQRGDYSHTFSRKDLQAELILLFEKQKEFGNPHVSGGLKEGIETLLMTQRPALSGDAVQKMLGHCTFEPAEPKAAKNTYTAERFIWLTKLNNLRILEQGSERPLTDTERATLMDEPYRKSKLTYAQARKLLGLEDTAFFKGLRYGKDNAEASTLMEMKAYHAISRALEKEGLKDKKSPLNLSSELQDEIGTAFSLFKTDEDITGRLKDRVQPEILEALLKHISFDKFVQISLKALRRIVPLMEQGKRYDEACAEIYGDHYGKKNTEEKIYLPPIPADEIRNPVVLRALSQARKVINGVVRRYGSPARIHIETAREVGKSFKDRKEIEKRQEENRKDREKAAAKFREYFPNFVGEPKSKDILKLRLYEQQHGKCLYSGKEINLVRLNEKGYVEIDHALPFSRTWDDSFNNKVLVLGSENQNKGNQTPYEYFNGKDNSREWQEFKARVETSRFPRSKKQRILLQKFDEDGFKECNLNDTRYVNRFLCQFVADHILLTGKGKRRVFASNGQITNLLRGFWGLRKVRAENDRHHALDAVVVACSTVAMQQKITRFVRYKEMNAFDGKTIDKETGKVLHQKTHFPQPWEFFAQEVMIRVFGKPDGKPEFEEADTPEKLRTLLAEKLSSRPEAVHEYVTPLFVSRAPNRKMSGAHKDTLRSAKRFVKHNEKISVKRVWLTEIKLADLENMVNYKNGREIELYEALKARLEAYGGNAKQAFDPKDNPFYKKGGQLVKAVRVEKTQESGVLLNKKNAYTIADNGDMVRVDVFCKVDKKGKNQYFIVPIYAWQVAENILPDIDCKGYRIDDSYTFCFSLHKYDLIAFQKDEKSKVEFAYYINCDSSNGRFYLAWHDKGSKEQQFRISTQNLVLIQKYQVNELGKEIRPCRLKKRPPVR

SEQ ID NO: 1102 - protein, 1082 aa, Neisseria meningitidis
MAAFKPNPINYILGLDIGIASVGWAMVEIDEEENPIRLIDLGVRVFERAEVPKTGDSLAMARRLARSVRRLTRRRAHRLLRTRRLLKREGVLQAANFDENGLIKSLPNTLWQLRAAALDRKLTPLEWSAVLLHLIKHRGYLSQRKNEGETADKELGALLKGVAGNAHALQTGDFRTPAELALNKFEKESGHIRNQRGDYSHTFSRKDLQAELNLLFEKQKEFGNPHISDGLKEGIETLLMTQRPALSGDAVQKMLGHCTFEPTEPKAAKNTYTTERFIWLTKLNNLRILEQGSERPLTDTERATLMDEPYRKSKLTYAQARKLLELDDIAFFKGLRYGKDNAEASTLMEMKAYHAISRALEKEGLKDKKSPLNLSPELQDEIGTAFSLFKTDEDITGRLKDRIQPEILEALLKHINFDKFVQISLKALRRIVPLMEQGKRYDEACAEIYGDHYGKKNTEEKIDLPPIPADEIHNPVVLRALSQARKVINGVVRRYGSPARIHIETAREVGKSFKDRKEIEKRQEENRKDREKAAAKFREYFPNFVGEPKSKDILKLRLYEQQHGKCLYSGKEINLGRLNEKGYVEIDHALPFSRTWDDSFNNKVLVLGSENQNKGNQTPYEYFNGKDNSREWQEFKARVETSRFPRSKKQRILLQKFDEDGFKERNLNDTRYVNRFLCQFVADRMRLTGKGKKRVFASNGQITNLLRGFWGLRKVRAENDRHHALDAVVVACSTVAMQQKITRFVRYKEMNAFDGKTIDKETGEVLHQKTHFPQPWEFFAQEVMIRVFGKPDGKPEFEEADTPEKLRTLLTEKLSSRPEAVHEYVTPLFVSRAPNRKMSGQGHMETVKSAKRLDEGISVLRVPLTQLKLKDLEKMVNREREPKLYEALKARLEAHKDDPAKAFAEPFYKYDKAGNRTQQVKAMRVEQVQKTGVWVRNHNGIADNATMVRVDVFEKGDKYYLVPIYSWQVAKGILPDRAVVQGKDEEDWQLIDDSFNFKFSLHPNDLVEVITKKARMFGYFASCHRGTGNINIRIHDLDHKIGKNGILEGIGVKTALSFQKYQIDELGKEIRPCRLKKRPPVR

SEQ ID NO: 1103 - protein, 1082 aa, Neisseria meningitidis
MAAFKPNPINYILGLDIGIASVGWAMVEIDEEENPIRLIDLSVRVFERAEVPKTGDSLAMARRLARSVRRLTRRRAHRLLRARRLLKREGVLQAADFDENGLIKSLPNTPWQLRAAALDRKLTPLEWSAVLLHLIKHRGYLSQRKNEGETADKELGALLKGVADNAHALQTGDFRTPAELALNKFEKESGHIRNQRGDYSHTFSRKDLQAELILLFEKQKEFGNPHVSGGLKEGIETLLMTQRPALSGDAVQKMLGHCTFEPAEPKAAKNTYTAERFVWLTKLNNLRILEQGSERPLTDTERATLMDEPYRKSKLTYAQARKLLGLEDTAFFKGLRYGKDNAEASTLMEMKAYHAISRALEKEGLKDKKSPLRLSPELQDEIGTAFSLFKTDEDITGRLKDRVQPEILEALLKHISFDKFVQISLKALRRIVPLMEQGKRYDEACAEIYGDHYGKKNAEEKIYLPPIPADEIRNPVVLRALSQARKVINGVVRRYGSPARIHIETAREVGKSFKDRKEIEKRQEENRKDREKAAAKFREYFPNFVGEPKSKDILKLRLYEQQHGKCLYSGKEINLGRLNEKGYVEIDHALPFSRTWDDSFNNKVLVLGSENQNKGNQTPYEYFNGKDNSREWQEFKARVETSRFPRSKKQRILLQKFDEDGFKERNLNDTRYVNRFLCQFVADRMRLTGKGKKRVFASNGQITNLLRGFWGLRKVRAENDRHHALDAVVVACSTVAMQQKITRFVRYKEMNAFDGKTIDKETGEVLHQKTHFPQPWEFFAQEVMIRVFGKPDGKPEFEEADTPEKLRTLLAEKLSSRPEAVHEYVTPLFVSRAPNRKMSGQGHMETVKSAKRLDEGVSVLRVPLTQLKLKDLEKMVNREREPKLYEALKARLEAHKDDPAKAFAEPFYKYDKAGNRTQQVKAVRVEQVQKTGVWVRNHNGIADNATMVRVDVFEKGDKYYLVPIYSWQVAKGILPDRAVVQGKDEEDWQLIDDSFNFKFSLHPNDLVEVITKKARMFGYFASCHRGTGNINIRIHDLDHKIGKNGILEGIGVKTALSFQKYQIDELGKEIRPCRLKKRPPVR

SEQ ID NO: 1104 - protein, 1082 aa, Neisseria meningitidis
MAAFKPNSINYILGLDIGIASVGWAMVEIDEEENPIRLIDLGVRVFERAEVPKTGDSLAMARRLARSVRRLTRRRAHRLLRTRRLLKREGVLQAANFDENGLIKSLPNTPWQLRAAALDRKLTPLEWSAVLLHLIKHRGYLSQRKNEGETADKELGALLKGVAGNAHALQTGDFRTPAELALNKFEKESGHIRNQRSDYSHTFSRKDLQAELILLFEKQKEFGNPHVSGGLKEGIETLLMTQRPALSGDAVQKMLGHCTFEPAEPKAAKNTYTAERFIWLTKLNNLRILEQGSERPLTDTERATLMDEPYRKSKLTYAQARKLLGLEDTAFFKGLRYGKDNAEASTLMEMKAYHAISRALEKEGLKDKKSPLNLSPELQDEIGTAFSLFKTDEDITGRLKDRIQPEILEALLKHISFDKFVQISLKALRRIVPLMEQGKRYDEACAEIYGDHYGKKNTEEKIYLPPIPADEIRNPVVLRALSQARKVINGVVRRYGSPARIHIETAREVGKSFKDRKEIEKRQEENRKDREKAAAKFREYFPNFVGEPKSKDILKLRLYEQQHGKCLYSGKEINLGRLNEKGYVEIDHALPFSRTWDDSFNNKVLVLGSENQNKGNQTPYEYFNGKDNSREWQEFKARVETSRFPRSKKQRILLQKFDEDGFKERNLNDTRYVNRFLCQFVADRMRLTGKGKKRVFASNGQITNLLRGFWGLRKVRAENDRHHALDAVVVACSTVAMQQKITRFVRYKEMNAFDGKTIDKETGEVLHQKTHFPQPWEFFAQEVMIRVFGKPDGKPEFEEADTLEKLRTLLAEKLSSRPEAVHEYVTPLFVSRAPNRKMSGQGHMETVKSAKRLDEGVSVLRVPLTQLKLKDLEKMVNREREPKLYEALKARLEAHKDDPAKAFAEPFYKYDKAGNRTQQVKAVRVEQVQKTGVWVRNHNGIADNATMVRVDVFEKGDKYYLVPIYSWQVAKGILPDRAVVQGKDEEDWQLIDDSFNFKFSLHPNDLVEVITKKARMFGYFASCHRGTGNINIRIHDLDHKIGKNGILEGIGVKTALSFQKYQIDELGKEIRPCRLKKRPPVR

SEQ ID NO: 1105 - protein, 67 aa, Neisseria meningitidis
MFGYFASCHRGTGNINIRIHDLDHKIGKNGILEGIGVKTALSFQKYQIDELGKEIRPCRLKKRPPVR

SEQ ID NO: 1106 - protein, 220 aa, Neisseria mucosa
MRHIFSDGLKEGIETLLMTQRPALSGDAVQKMLGHCTFEPTEPKAAKNTYTAERFIWLTKLNNLRILEQGSERPLTNTERATLMDEPYRKSKLTYAQARKLLGLKDTAFFKGLRYGKDNAEASTLMEMKAYHAISRALEKEGLKDKKSPLNLSPELQDEIGTAFSLFKTDEDITGRLKTELTPASNKTLSRPFTVKSASNGSTSAPWLPSTKWFLHFKPA

SEQ ID NO: 1107 - protein, 392 aa, Neisseria sp.
MAPFTLKPLNYILGLDIGIASVGWAVVETDSDVLPYRLIDVGVRTFDRAEVPKTGESPAAARRLARSVRRMIRRRAHRMLRARRLLKREGMLQAADFDAHGLVENLPVNPWQLRVDALSRKLMPLEWAAVLLHMVKHRGYLSQRKNERNSSDKELGALLSGVAANSEALQGGDFRTPAELAVNKFEKESGHIRNQRGDYSHTFNRKDVQAELVLLFEKQKEYGNPYISDGLLTGVEDLLMTQRAALSGDAVQKMLGRCTFEPEEYKAAKNTYSAERFVWLTKLNNLRILDQGSERPLTDSERAKLMDEPYKKTKLTYAQVRRLLELDDTAFFKGLRYSKDNAESATLMEMKAYHSISGALEKAGLKNKKIAAGLIARIAGRNRRGVFAIQNR

SEQ ID NO: 1108 - protein, 701 aa, Neisseria sp.
MQDEIGEAFSLFKTDEDIRGRLKGKLPDEQLDALLEYVSFDKFVQLSLKALRKILPLMEQGKRYDEACAEIYGDHYGIKDDKQAQFLPPVSADEIRNPVVLRALSQARKVVNAVVRRYGSPARVHIETAREVGKSFLDRKKIEKRQEENRKDRERSIAKFREYFPNFVGEPKAKDILKMRLYEQQQGQCLYSGKAIDLRRLNEKGYVEIDHALPFSRTWDDSFNNKVLVLAGENQNKRNQTPFEWLGGDEKRWREFTARVEHCRFPRSKKQRILMQKLDEKDFKERNLNDTRYVNRFLCNFIAQNMLLTGEDKNRVFASNGQITNLLRGMWGLKKVRESNDRHHALDAVVVACSTVAMQQKITNYVRQKEMNVFDGEMVDKTTGEVSRLHFPQPWDFFRQEVMMRVFGKPDTPSENNEEADTPEKLRALLADKLSSRPEAVHEAVTPLFVSRAPSRKMSGQGHMETIKSAKRLSEGKSVLRVPLTQLTPKLLENMVNREREPQLYEDLLGRLNAHGGDPAKAFAAPFFKRDKAGNPTQQVKAVRVEDVQKSGVIVREGNGVADNATMVRVDVFEKGGKYYLMPIYTWQAAKGILPNKAVIAHTDEANWQEMDTSFTFKFALYPNDLVLASLKKETYFGYFAGLDRSTGNISLRVHDLEKSKGKDGVYRIGVKTALSFQKYQVDELGKTIRPCRLKKRPPVR

SEQ ID NO: 1109 - protein, 1089 aa, Neisseria sp.
MTAFKPNPLNYILGLDIGIASVGWAMVEIDDKENPVRLIDLGVRVFERAEMPKTGDSLAAARRLARSVRRLTRRRAHRLLRARRLLKHEGVLKPEDFDENGLVKPLPYIPKQPRNTPWQLRAAALDRKLTPLEWAAVLLHLVKHRGYLSQRKNEGETDDKELGALLKGVADNTHALQAGNFRTPAELALNKFEKESGHIRNQRGDYSHTFSRKDLQAELVLLFEKQKEFGNPYVSDDLKNGIENLLMTQRPALSGDAIQKMLGHCTFEPAEPKAAKNTYTAERFIWLTKLNNLRILNQGNERPLTDAERTTLMDEPYKKSKLTYAQARKLLDLDDTAFFKGLRYGKDNAESATLMEMKAYHAISRALEKEGLKDKKSPLSLSPELQDEIGTAFSLFKTDEEITGRLKGCLQPEILDALLKHISFDKFVQISLKALRRIVPLMEQGKRYDEACAEIYGDHHGRRNSEETLYLPPIPADEIRNPVVLRALSQARKVINGVGRRYGSPARIHIETAREVGKSFKDRKEIEKRQEENRKDREKAAAEFQEYFPNFVGEPKSKDILKLRLYRQQNCKCLYSGKEINLGRLNEKGYVEIDHALPFSRTWDDSFNNKVLVLGSENQNKGNRTPYEYLNGKDNSREWQEFKARVETSRFPHSKKQRILLQKFDEEGFKERNLNDTRYVNRFLCKFVADHMQLTGKGKRRVFASNGQITNLLRGFWGLRKVRAENDRHHALDAVVVACSTVAMQQRITRFVRYKEMNAFDGKTVDKETGEVLHQKTHFPQPWEFFAQEVMIRVFGKPDGKPELEEADTPEKLRALLAEKLSSRPEAVHEYVAPLFVSRAPNRKMSGQGHMETIKSPKRLDEGISVVRVPLTQLKLKDLEKMVNREREPKLYEALKARLEAHKDDPAKAFAEPFYKQDKAGNRTQQVKAVRIEQVQKTGVWVRNQNGIADNATMVRVDVFEKGGKYYLVPIYSWQVAKGILPDKAIIAFKDEEEWQLIDDSFNFKFPLHPNDLVEVITKKARIFGYFASCHRGTGNINIRIHDLDNKVGKNGILEGIGVKTALSFQKYQIDELGKEIRPCRLKKRPPVR

SEQ ID NO: 1110 - protein, 1097 aa, Neisseria wadsworthii
MKKQPQRYILGLDLGIASVGWALILVDGAENPVGLLDCGVRTFERAEVPKTGDSLALARRQARSVRRLIRRRAHRLLRLRRLLKREGILSAADFNSDGLPNLPIDAWQLRVAGLERKLTNQEWAAVLLHLVKHRGYLSQRKSETQTENKELGRLLAGVAENSKLLSESSEQYRTPAELAVKLFAEQSGHLRNKGGEYTHTFNRLDLQKELHLLFERQYALGNPFASAELQSKVDELLMTQRSALQGEAVLKMLGKCTFEPSEYKAAKNTYSAERFIWLTKLNNLRILYNGEERALDEGDRKKLLDEPYKKAKLTYKQVRSILNLPESAVFKGLRYGKDSDGLKAENGTLMEMKAYHKIRTILDKAGLKGEWENRIRNPEILDKIGTAFSLYKTDEDIQAALADLRLPENVLDALLAGLNFDKFIQLSLKALRNILPLMERGIRYDEACKEVYGDHRALAESKNQVLLPPIPADEIRNPVVLRTLTQARKVINAIIRRYGSPQRVHIETARELGKSKQERDKIDRKNKENQNDRNRLASDIRKHFNFEPTPKDILKLRLYEQQHGKCLYSDLREEKGECLYTGNVIELHRLFEDGYVEIDHALPLSRTWDNSLNNKVLVLKSSNQNKGNKTPYEWLDGANNSRRWREFQARVQGCHFPYVKKQRIQTAKLDSKAEQGFLERNLNDTRYISKFMCQFITANLRLAETSNALMEEVAGENPYWKERKRQRVFAPSGSIIALLRGLWGLKKVREDNDRHHALDAIVVACSTVSMQQKITKAMQRRETLETVDSETGEVKTRIPQPWDFFRQEVMIRVFSDSPREELAEKLNSRPEALHDFVSPLFVSRAPNRKMTGQGHLETVKSAKRLSENISVVRKPLTALKLKDIENIVGYPDREPALYQALRERLLAHKDDPVKAFADKPFYKPAKDGGQGSLVKAVRIIENTKHGLKIRNGITDTNGDMVRTDVYQKTDKKGKRQYFIVPVYAWQVEKNELPTVDCKGYEIDDNYEFCFSLYKYDLIEIQNPNDINQELRAYYINCDSSDGRFWLAYHDKSAKEQQFRISTQNQPIIKKYQVDTLGKEIRLCKAEKRTALNGKKKK

SEQ ID NO: 1111 - protein, 1426 aa, Niabella soli
MPRKNILGLDLGTTSIGFAKIIEDDDYQCSSVELIGVRVNPLTTDEQTNFEKGKPVSVNADRTLKRGMRRNLDRYQLRRDYLIEILRTHHIITADTKLAEDGKNTTHTTYALRALAATAEIPLEAFVRVLLAINKKRGYKSSRKAKNEDEGQLIDGMAIARRLYEESLTPGQFSYQLLKEGKKYLPDFYRSDLNTELNKVWNFQKQFYPEILTDEFKRHLEGKGQRATAVAFWGQHGFSMAENKGSREEKKLHAYKWRSEAAHKQLTKEEVAFVITEINNDLNKSSGYLGAISDRSKELFFNKQTVGQYLHQQLKENPHTRLKGQVFYRQDYLDEFETIWEMQAKFYSALTLELKEEVRDVVIFYQRKLKSQMGLISLCEFESKEIEIEKNGEKAKKRIGLRVAPKSSPLFQEFKIWQVLNNLEFRNKKTKEVFVPEMAAKQQLFDELNIKGNLLASEAIKILGYKTKDWEANYHTLEGNRTNKSLYDAWLKILELEGYDENLLKLSGSDDIDVSKIEKPALEIRQMVLAVFEVLGISGAILDFDAEADGKAFEQQPAYQLWHLLYSAEDDGKKYSQEDIFTYGHDNIGLKKKLCEKFGFRPEHTKILVNVVFSDDYGNLSSKAMRRIYPFIKELTYDKACAEAGYRHSAASLTKEEIAARPLQNRLDLLKKNELRSPVVEKILNQMVNVVNTLVDDENQNRKARGLSEDFHFDEIRIELARELKKNAKERAEMTTNINTAKQSHEKIIRILQTEFGVPNPSRNDIVRYKLYEELKNNGYKDLYTNTYISRDILFSKQIDVDHIIPQMSLFDDSFSNKTVVFRKDNQDKGNKTAYDYILGKYGEQALEEYISRITSLFELGKKNKEEGIGKAKFQKLQKRLVDIGDGFIERDLRESQYIAKKANNMLYAICRSVVSTSGEITARLREDWDLVNVMQEINLPKFRALGLTEMVEKKDGAQKERITDWTKRNDHRHHAMDALAIAFTRHSHIQYLNHLNARKDEANKWHPVVSKIEEKETVLIYDDLGNRKRKFKAPMPNFREVVKEHLENVLISHKAKNKVVTKNKNKIKTVRGEKVKTELTPRGQLHKETIYGRYRYYESKEEKIGPKFDAEMIGMVTNPQYKKLLLERLAANGNDPKKAFWGKNALNKNPLYVDEARQELLPEKILLRWLNDDYSIRKDVTPENLKDIKTIEKILDKGVKKILLKRLADFGNDPKKAFSDLDKNPIWQNEAKRIAIKRVTISGIKNAAPLHHKKDHLGNDILDEKGKQIPSSFVSTGNNHHVAIYRDAEGNLQERVVSLFDAVQLVNGGEPVIDKEYNKGIGWQFLFTMKQNEMFVFPDEKTGFNPREVDLLSSGNRKLISPNLFRVQKLASKNYFFRHHLETSVEEKKELKNIAYKPQLGLNALSNIVKVRINHIGEIVSVGEY

SEQ ID NO: 1112 - protein, 79 aa, Nitritalea halalkaliphila
MPLRLPERVYKMISSTGAECHFLPVNVSSLIKGYDAKSKLGEFGSQNKQEVTSDSFIRVKERCYKLEINRLGIPLNRLK

SEQ ID NO: 1113 - protein, 1498 aa, Odoribacter laneus
METTLGIDLGTNSIGLALVDQEEHQILYSGVRIFPEGINKDTIGLGEKEESRNATRRAKRQMRRQYFRKKLRKAKLLELLIAYDMCPLKPEDVRRWKNWDKQQKSTVRQFPDTPAFREWLKQNPYELRKQAVTEDVTRPELGRILYQMIQRRGFLSSRKGKEEGKIFTGKDRMVGIDETRKNLQKQTLGAYLYDIAPKNGEKYRFRTERVRARYTLRDMYIREFEIIWQRQAGHLGLAHEQATRKKNIFLEGSATNVRNSKLITHLQAKYGRGHVLIEDTRITVTFQLPLKEVLGGKIEIEEEQLKFKSNESVLFWQRPLRSQKSLLSKCVFEGRNFYDPVHQKWIIAGPTPAPLSHPEFEEFRAYQFINNIIYGKNEHLTAIQREAVFELMCTESKDFNFEKIPKHLKLFEKFNFDDTTKVPACTTISQLRKLFPHPVWEEKREEIWHCFYFYDDNTLLFEKLQKDYALQTNDLEKIKKIRLSESYGNVSLKAIRRINPYLKKGYAYSTAVLLGGIRNSFGKRFEYFKEYEPEIEKAVCRILKEKNAEGEVIRKIKDYLVHNRFGFAKNDRAFQKLYHHSQAITTQAQKERLPETGNLRNPIVQQGLNELRRTVNKLLATCREKYGPSFKFDHIHVEMGRELRSSKTEREKQSRQIRENEKKNEAAKVKLAEYGLKAYRDNIQKYLLYKEIEEKGGTVCCPYTGKTLNISHTLGSDNSVQIEHIIPYSISLDDSLANKTLCDATFNREKGELTPYDFYQKDPSPEKWGASSWEEIEDRAFRLLPYAKAQRFIRRKPQESNEFISRQLNDTRYISKKAVEYLSAICSDVKAFPGQLTAELRHLWGLNNILQSAPDITFPLPVSATENHREYYVITNEQNEVIRLFPKQGETPRTEKGELLLTGEVERKVFRCKGMQEFQTDVSDGKYWRRIKLSSSVTWSPLFAPKPISADGQIVLKGRIEKGVFVCNQLKQKLKTGLPDGSYWISLPVISQTFKEGESVNNSKLTSQQVQLFGRVREGIFRCHNYQCPASGADGNFWCTLDTDTAQPAFTPIKNAPPGVGGGQIILTGDVDDKGIFHADDDLHYELPASLPKGKYYGIFTVESCDPTLIPIELSAPKTSKGENLIEGNIWVDEHTGEVRFDPKKNREDQRHHAIDAIVIALSSQSLFQRLSTYNARRENKKRGLDSTEHFPSPWPGFAQDVRQSVVPLLVSYKQNPKTLCKISKTLYKDGKKIHSCGNAVRGQLHKETVYGQRTAPGATEKSYHIRKDIRELKTSKHIGKVVDITIRQMLLKHLQENYHIDITQEFNIPSNAFFKEGVYRIFLPNKHGEPVPIKKIRMKEELGNAERLKDNINQYVNPRNNHHVMIYQDADGNLKEEIVSFWSVIERQNQGQPIYQLPREGRNIVSILQINDTFLIGLKEEEPEVYRNDLSTLSKHLYRVQKLSGMYYTFRHHLASTLNNEREEFRIQSLEAWKRANPVKVQIDEIGRITFLNGPLC

SEQ ID NO: 1114 - protein, 1389 aa, Oenococcus kitaharae; identical to SEQ ID NO: 236

SEQ ID NO: 1115 - protein, 1535 aa, Ornithobacterium rhinotracheale
MNTILGLDLGTNSIGWALIKVLNDKTRLPLEIIDLGVVVIPTDQRTLDKFSKGESISKTAERTKQKGVRKLYERKKLRRERLHRVLNILGFLPEHYSKKIDFKKHLGQFFGNSQPKISYVENDHGKHEFIFMDSYREMLKEFSKHNIKNVPYDWTIYYLRKKALSQKISKEELAWVILNFNKKRGYYQFRDDNADENKENKIEKYYALKVTNVKKEDAQNYTITLENGWIYKNKSKISLLDWVGSTKEFISTEKFDNKGNIIKKKNGEDDRTLKLVDSEKDWIAIKKSTEDRIENYGKTVGTYLYEHLLKDPNQKLNGELINIIDRKFYKNELKQILEKQKEFHPELLNEDLFQKSIIELYPKNSTRQKELKNKDLCYLLIDDVIYYQRDLKKKNSTINKCSFESREYYLNGEKQIQKINCIAKSKPLYQEFRTLQFIKNLKVYEIIDGLEKDITSKLLPDFETKEHFFEWLNDKEKIDQLQLLSYKCFDLHDNVKNDLIAKGIKRPTEKAIRTELLEKYRWNYSKDNDRNFLLNETRFKILKYLKKVDKKLTLTNEQIESLWLLLYSAKDERELKNGLQKFSEKNKLPKKFSDIFISFPPFKKEYGAYSEKALKKLLSLVRFGKYWSFNKIDNNIQNKIMNILNGEVDDSISDRVREKTILLQDKNDFQDLPLWLASYVAYNRFSEVSEIKYWDSPDKIEFLKQHSIGNPIVEKIINETLKLIKDIWVIHGKSCKNFFSEIHIELSREIKSSSKKRAQITNNNTKNQKLNNLIKSLLIEMASDTKYENVTPYSPSQQEILKIYDEGIYSKEENSEKIKEINKIRNNNKISKSDITKYKLWLEQGYISPYTGKIIPLTKLFTAKYQKEHIIPQTKFFDDSFNNKVICEAEVNKLKDNSLAMNFIKAKGGKAVKLSDGETVTILNQEEYKQLVRTSFKKNSIKLRNLLLEEIPDTFTKRQLNDTKYISKLVLSLLSNIVREKGELESTAKRIVSTNGQITSILRNDWGLNNIWNKLITPRFERLNNINKNKIYGNWENKKGKNVFQINYLNDNLSTLNTKRIDHRHHALDALIVACTTRNHINFLNNQYAKSRNQRHDLRAKLKRRETITTEGSKKQVFKDFIKPWESFTQDALKKLETTIVNFKVNKRIINKTINWYKKWEKQKDGTYKKIQKKQTKGDAWAIRKPLHIDTIYGIVCKKLPLKSALENYKNIIDENLKHKIKELKEVNKFDNNQIINFFKECNFIFEDNNIQKVEVYDFKDNRDKTILSSSRQLIDESFTPKKIGKVLDPTIRNILLKHLNSTKYNNKFDSDGNPIKPEKLAFSPEGLKDLNKNIKHLNNNKEHQPIKRVKLFETLGNKIKVGYTQQKNKKFAETATGTNLFLGIYSDNNKRDFKTIPLILAIQREKEGLNPCPDTDEKGNQLLFSLSPNELVFVPNNEERKNPNLVDFENLSKDQIDRIYKFVSCTGSEAYFVPSRTAKPIIENENGTNNKSQRIIEFNEKTSIKNEKNEPVLIKTICWKIEVNRLGKIIKVIK

SEQ ID NO: 1116 - protein, 103 aa, ParaBacteroides merdae
MIVYRLFYRFLFKATKLVNFVIHKELKRQIARTGKIKFHSGGCGCQSGNYKMQNFEKGKSITTNADRTLKRSMRRNLYRCKLRRDVLIELLKKVGFIPEKQWK

SEQ ID NO: 1117 - protein, 82 aa, ParaBacteroides merdae
MSIWKLQYPPLDLKIYNKFLVYSRVNPLTVDEMQNFEKGKSITTNADRTLKRSMRRNLQRYKLRRDVLIELLKKVGFMSEKQ

SEQ ID NO: 1118 - protein, 84 aa, ParaBacteroides merdae
MSIWKLQYPPLDLKIYNKFLVYSRVNPLTVDEMQNFEKGKSITTNADRTLKRSMRRNLYRCKLRRDVLIELLKKVGFIPEKQWK

SEQ ID NO: 1119 - protein, 398 aa, Pasteurella bettyae
MLANENQNKGNLTPYEWLDGKNNSKRWQDFVARVQTCCFSHRKKQHILSHKLDEKSFIERNLNDTRYVARFLCNFIADNMLLTGKGKRKVFASNGQITALLRGRWGLQKVRDDNDRHHALDAVVIACSTVAMQQKITRFVKYEEGNVFSGERIDRETGEIIPLYFPTPWKFFKENVEIRIFSENPKLELENRLPDYPQYNHEFVQPLFVSRMPTRKMTGQGHMETIKSAKRLDEGISVLKVPLTQLKLADLENMVNRERELALYEALKERLELFGNDPAKAFIEPFYKKGGALVKAVRVKKVQKSGVLVRDGNGVADNALMVRVDVFTKGGKYFLVPIYTWQVAKGILPNKAVTANIDEIDWLEMDESYQFIFTMYPNDLVKVKLKKEEFFGYYGGLD

SEQ ID NO: 1120 - protein, 610 aa, Pasteurella bettyae
MNMLKPLNYILGLDLGIGSVGWAVVEIDEQGNPLRLIDVGVRTFERAEVAKTGESLALARRLARSSRRLVKRRAARIKKAKRLLKAENILLSVDEILPNDVWQLRVKGLDHKLERQEWAAVLLHLLKRRGYLSQRKNESKSENKELGALLSGVVTNHQILQTDEYRTPAEIAVHKFQAEDGHIRNQRGDYTHTFSRLDLLAEMELLFQRQTELGNLHTSSKLLENLTALLMWQKPALAGEAILKMLGKCTFEPTEYKAAKNSYSAERFVWLTKLNNLRILEQGAERALTDSERFVLLDQPYEKAKLTYAQVRTLLKLSDEAIFKGVRYQGEDKKTVESKTTLMEMKAYHQIRKALDGADLKDEWNTLKNDSALLDEIGTAFSLYKTDDDISHYLGGKLSEKVLNVLLENLNFDKFIQLSLKALQKILPLMLQGQRYDEAVSAVYGDHYGKKSAESCRLLPAIPANEIHNPVVLRTLTQARKVINAVVRLYGSPARIHIETGRKVGKSYQDRKKLEKQQEENREQRESAVKKFKEYFPNFVGEPKGKDILKLRLYELQQSKCLYSGKSFDPNRLLEKGYVEVDHALPFSRTWDDSFNNKVCLPMKTRIKAI

SEQ ID NO: 1121 - protein, 199 aa, Pasteurella multocida
MACATPSMQQKITRFIRFKEVHPYKIENRYEMVDQESGEIISPHFPEPWAYFRQEVNIRVFDNHPDTVLKEMLPDRPQANHQFVQPLFVSRAPTRKMSGQGHMETIKSAKRLAEGISVLRIPLTQLKPNLLENMVNKEREPALYAGLKARLAEFNQDPAKAFTTPFYKQGGQQVKAIRVEQVQKSGVLVRENNGVADNA

SEQ ID NO: 1122 - protein, 63 aa, Pasteurella multocida
MQTTNLSYILGLDLGIASVGWAVVEINENEDPIGLIDVGVRIFERAEVPKTGESLALSRRLAR

SEQ ID NO: 1123 - protein, 1058 aa, Pasteurella multocida
MQTTNLSYILGLDLGIASVGWAVVEINENEDPIGLIDVGVRIFERAEVPKTGESLALSRRLARSTRRLIRRRAHRLLLAKRFLKREGILSTTDLEKGLPNQAWELRVAGLERRLSAIEWGAVLLHLIKHRGYLSKRKNESQTNNKELGALLSGVAQNHQLLQSDDYRTPAELALKKFAKEEGHIRNQRGAYTHTFNRLDLLAELNLLFAQQHQFGNPHCKEHIQQYMTELLMWQKPALSGEAILKMLGKCTHEKNEFKAAKHTYSAERFVWLTKLNNLRILEDGAERALNEEERQLLINHPYEKSKLTYAQVRKLLGLSEQAIFKHLRYSKESAESATFMELKAWHAIRKALENQGLKDTWQDLAKKPDLLDEIGTAFSLYKTDEDIQQYLEGKLPDSVINALLVSLNFDKFIELSLKSLRKILPLMEQGKRYDQACHEIYGHHYGEKNQQISQLLPVIPTQEIRNPVVLRTLSQARKVINAIIRQYGSPARVHIETGRELGKSFKERREIQKQQEDNRTKRESAVQKFKELFSDFSSEPKSKDILKFRLYEQQHGKCLYSGKEINIHRLNEKGYVEIDHALPFSRTWDDSFNNKVLVLASENQNKGNQTPYEWLQGKINSERWKNFVALVLGSQCSAAKKQRLLTQVIDDNKFIDRNLNDTRYIARFLSNYIQENLLLVGKNKKNVFTPNGQITALLRSRWGLIKVRENNDRHHALDAIVVACATPSMQQKITRFIRFKEVHPYKIENRYEMVDQESGEIISPHFPEPWAYFRQEVNIRVFDNHPDTVLKEMLPDRPQANHQFVQPLFVSRAPTRKMSGQGHMETIKSAKRLAEGISVLRIPLTQLKPNLLENMVNKEREPALYVGLKARLAEFNQDPAKAFATPFYKQGGQQVKAIRVELVQKSGVLVRQGNGVADNAPGSIVRTDVFIKNNKFFLVPIYTWQVAKGILPNKAIVAHKNEDEWEEMDEGAKFKFSIFPNDLIELRTKTECFLGYYIGPDRHNGSISLREHDSEISKGNAGVYRVGVKLALSLEKYHIDELGKNRRICRPHQRRPVR

SEQ ID NO: 1124 - protein, 1056 aa, Pasteurella multocida
MQTTNLSYILGLDLGIASVGWAVVEINENEDPIGLIDVGVRIFERAEVPKTGESLALSRRLARSTRRLIRRRARRLLLAKRFLKREGILSTTDLEKGLPNQAWELRVAGLERRLSAIEWGAVLLHLIKHRGYLSKRKNESQTNNKELGALLSGVAQNHQLLQSDDYRTPAELALKKFAKEEGHIRNQRGAYTHTFNRLDLLAELNLLFAQQHQFGNPHCKEHIQQYMTELLMWQKPALSGEAILKMLGKCTHEKNEFKAAKHTYSAERFVWLTKLNNLRILEDGAERALNEEERQLLINHPYEKSKLTYAQVRKLLGLSEQAIFKHLRYSKENAESATFMELKAWHAIRKALENQGLKDTWQDLAKKPDLLDEIGTAFSLYKTDEDIQQYLTNKVPNSVINALLVFLNFDKFIELALKSLRKILPLMEQGKRYDQACREIYGHHYGEANQKTSQLLPAIPAQEIRNPVVLRTLSQARKVINAIIRQYGSPARVHIETGRELGKSFKERREIQKQQEDNRTKRESAVQKFKELFSDFSSEPKSKDILKFRLYEQQHGKCLYSGKEINIHRLNEKGYVEIDHALPFSRTWDDSFNNKVLVLASENQNKGNQTPYEWLQGKINSERWKNFVALVLGSQCSAAKKQRLLTQVIDDNKFIDRNLNDTRYIARFLSNYIQENLLLVGKNKKNVFTPNGQITALLRSRWGLIKIRENNDRHHALDAIVVACATPSMQQKITRFIRFKEVHPYKIENRYEMVDQESGEIISPHFPEPWAYFRQEVNIRVFDNHPDTVLKEMLPDRPQANHQFVQPLFVSRAPTRKMSGQGHMETIKSAKRLAEGISVLRIPLTQLKPNLLENMVNKEREPALYAGLKARLAEFNQDPAKAFTTPFYKQGGQQVKAIRVEQVQKSGVLVRENNGVADNASIVRTDVFIKNNKFFLVPIYTWQVAKGILPNKAIVAHKNEDEWEEMDEGAKFKFSLFPNDLVELKTKKEYFFGYYIGLDRATGNISLKEHDGEISKGKDGVYRVGVKLALSFEKYQVDELGKNRQICRPQQRQPVR

SEQ ID NO: 1125 - protein, 134 aa, Pasteurella multocida
MVNKEREPALYAGLKARLAEFNQDPAKAFTTPFYKQGGQQVKAIRVEQVQKSGVLVRENNGVADNASIVRTDVFIKNNKFFLVPIYTWQVAKGILPNKAIVAHKNEDEWEEMDEGAKFKFSLFPNDLVELKTKK

SEQ ID NO: 1126 - protein, 53 aa, Pasteurella multocida
YSKENAESATFMELKAWHAIRKALENQGLKDTWQDLAKKPDLLDEIGTAFSLL

SEQ ID NO: 1127 - protein, 1366 aa, Pediococcus acidilactici
MGDRKYNLGLDIGTSSIGFAAVDENNQPIRVKGKTAIGVRLFEEGKTAADRRGFRTTRRRLSRRRWRINLLNEIFDAHLAEVDPTFLARLKESNRSNLDPKKSFQGSLLFPERKDYQFYEEYPTIYHLRKALMEEDRKFDIREIYLAVHHIIKYRGNFLNGTPMRSFKVENIELDTLFDQLNQLYAEIVPDNELAFDLAQVADVKDVLSSTTIYKMDKKKQLVKMMLLPASNKALQSENKKIVTQFVNAILNYKFKLDVLLQVETDADWSLKLNDEGADDKLEEFTGDLDENRLEIIDLLQRLHNWFSLNEITKDGNSLSAAMVEKYENHHHHLGLLKKVIENHPDAKKAKALKETYTAYVGKTDDKTQNQDDFYKAVEKNLDDSPDAKEIKRLIQLDQFMPKQRTGQNGAIPHQLHQQELDQIIEKQSKYYPFLAEPNPNVKRRKDAPYKLDELIAFKIPYYVGPLVTPEEQAQNKENVFAWMKRKAAGPITPWNFDEKVDRMESANRFIRRMTTKDTYLFGEDVLPAESMIYQKFVVLNELNNLKINGRHLSLKDKQDVYNDLFKQQKTVSIKALQNYYVTKKKAATAPTVGGLADPKKFLSSLSTYIDFKNMFGERVNDPQFQEDLEQIVEWSTIFEDRGIFKAKLQALGWLSEKQIQQLVAKRYKGWGRLSKKLLTGLKNAEGYSILDEMWRSTENFMQIQTRPEFAALIQQANEKQFEGNDPNNVWENIESILGDAYTSPQNKKAIRQVVKVVQDIEKAVGNPPEKIAIEFTREAAANPQRTQSRLRTLEKLYESAEEVVDAGLTAELAEFKENKHVLSDKYYLYFTQLGRDVYTGDTISLDKLNDYDVDHILPQSFIKDDSLDNRVLTIRAVNNGKSDNVPAKMFGKKMGSFWRYLLDNGMISKRKYNNLITDPDNISKYAQKGFINRQLVETSQVIKLTANILNGIYDKDTEIIEVPAKMNSQMRKMFDLVKVREVNDYHHAFDAYLTIFIGKYLYKCYPKLRPYFVYGKFKKFGDNEDIEVGDGRFNFLNRIERLKNVTDPETGEILWSNVAPNETIKQIKKVYNYKFMLVSRETTTRRAELFNQTVYPKNYRGKLIPIKEDRPTDLYGGYSGNTDAYLAIVALEDKKKGKYFKVVGIPTRAAAKLEKLKQQDSQQYLQALHKVIAPQFTKSTKKGIKKTEFEIVLDKVHYRQLVQDGPVKMMLGSSTYKYNAKQLVLSEKALQVIADDRKFDETQKDDNLIAVYDEILSIVNQSFDLYDINGFRKKLNDNRDQFIDLPAETKYEGRKVVAHGKREMILEILKGLHANAAFGNLKPIGFSTAFGQLQVPNGIILSKNAILIHQSPSGLFERKIKLSDL

SEQ ID NO: 1128 - protein, 1229 aa, Pediococcus acidilactici; identical to SEQ ID NO: 125

SEQ ID NO: 1129 - protein, 270 aa, Pediococcus lolii
LFNQTIYSAKASKTMIPIKNDRPTKLYGGYSGNEDAYMSIIRLSDKKKTYKVVGISMRDASKLKAYENNAHEEYLKKLKEVIEQQFLDSGKKTKADFEIVIPKVNYHQRMQDGTKQFRIGSSKYVHNTKQLVLSEKTLKAIRNNKQYNGDAEKDLINAFDEILTIVNDSFSIFDIRSFRKKLNESRDKFVSLPVEDTKEKSKVIKGKRETLKQILIALHANGTSQDIPQLGLKSFGKMVKTGGLTLSENTALIHQSPSGLFEHKIKLSDL

SEQ ID NO: 1130 - protein, 1016 aa, Pediococcus lolii
MNGIFDAHLAEVDPTFLARLKESNRSNLDPKKSFQGSLLFPERKDYQFYKEYPTIYHLRKALMEKDRKFDIREIYLAVHHIIKYRGNFLNGTPMRSFKVENIELDTLFDRLNQLYEEIIPDNELAFDLEQVADVKEVLSSTTIYKMDKKKQLVKMMLLPASNKALQSENKKIVTQFVNAILNYKFKLDVLLQVETDADWSLKLNDEGADDKLEEFTGDLDENRLEIIDLLQRLHNWFSLNEITKDGNSLSAAMVEKYKDHRHHLELLKKVIEDHSDAKKAKALKETYTAYVGKTDDKTQNKDDFYKAVEKNLDDSPEAKEIKRLIQLDQFMPKQRTGQNGAIPHQLHQQELDQIIEKQSKYYPFLAEPNPNVKRRKDAPYKLDELIAFKIPYYVGPLVTPEEQAQNKENVFAWMKRKAAGPITPWNFDEKVDRMESANRFIRRMTTKDTYLFGEDVLPAESMIYEKFVVLNELNNLKINGRHLSLKDKQDIYNDLFKQQKTVSIKALQNYYVTKKKAATAPTVGGLADPKKFLSSLSTYIDFKNMFGERVNDPQFQEDLEQIVEWSTIFEDRGIFKAKLQALGWLSEKQIQQLVAKRYKGWGRLSKKLLTGLKNAEGYSILDEMWHSTENFMQIQTRPEFAALIQQANEKQFEGNDPDNVWENIENILGDAYTSPQNKKAIRQVVKVVQDIEKAVGNPPEKIAIEFTREAAANPQRTQSRLRTLEKLYESAEEVVDAGLTAELAEFKENKHVLSDKYYLYFTQLGRDVYTGDTISLDRLNDYDVDHILPQSFIKDDSLDNRVLTIRAVNNGKSDNVPAKMFGKKMGSFWRYLLDNGMISKRKYNNLITDPDNISKYAQKGFINRQLVETSQVIKLTANILNGIYDKDTEIIEVPAKMNSQMRKMFDLVKVREVNDYHHAFDAYLTIFIGNYLYKCYPKLRPYFVYDNFKKFGNKEDIGHKRFNFLGKIERDKKVVAPETGEILWSNVAPNETIKQIKKVYDYKFMLTSHETYTKHG

SEQ ID NO: 1131 - protein, 1333 aa, Planococcus antarcticus
MKNYTIGLDIGVASVGWVCIDENYKILNYNNRHAFGVHEFESAESAAGRRLKRGMRRRYNRRKKRLQLLQSLFDSYITDSGFFSKTDSQHFWKNNNEFENRSLTEVLSSLRISSRKYPTIYHLRSDLIESNKKMDLRLVYLALHNLVKYRGHFLQEGNWSEAASAEGMDDQLLELVTRYAELENLSPLDLSESQWKAAETLLLNRNLTKTDQSKELTAMFGKEYEPFCKLVAGLGVSLHQLFPSSEQALAYKETKTKVQLSNENVEEVMELLLEEESALLEAVQPFYQQVVLYELLKGETYVAKAKVSAFKQYQKDMASLKNLLDKTFGEKVYRSYFISDKNSQREYQKSHKVEVLCKLDQFNKEAKFAETFYKDLKKLLEDKSKTSIGTTEKDEMLRIIKAIDSNQFLQKQKGIQNAAIPHQNSLYEAEKILRNQQAHYPFITTEWIEKVKQILAFRIPYYIGPLVKDTTQSPFSWVERKGDAPITPWNFDEQIDKAASAEAFISRMRKTCTYLKGQEVLPKSSLTYERFEVLNELNGIQLRTTGAESDFRHRLSYEMKCWIIDNVFKQYKTVSTKRLLQELKKSPYADELYDEHTGEIKEVFGTQKENAFATSLSGYISMKSILGAVVDDNPAMTEELIYWIAVFEDREILHLKIQEKYPSITDVQRQKLALVKLPGWGRFSRLLIDGLPLDEQGQSVLDHMEQYSSVFMEVLKNKGFGLEKKIQKMNQHQVDGTKKIRYEDIEELAGSPALKRGIWRSVKIVEELVSIFGEPANIVLEVAREDGEKKRTKSRKDQWEELTKTTLKNDPDLKSFIGEIKSQGDQRFNEQRFWLYVTQQGKCLYTGKALDIQNLSMYEVDHILPQNFVKDDSLDNLALVMPEANQRKNQVGQNKMPLEIIEANQQYAMRTLWERLHELKLISSGKLGRLKKPSFDEVDKDKFIARQLVETRQIIKHVRDLLDERFSKSDIHLVKAGIVSKFRRFSEIPKIRDYNNKHHAMDALFAAALIQSILGKYGKNFLAFDLSKKDRQKQWRSVKGSNKEFFLFKNFGNLRLQSPVTGEEVSGVEYMKHVYFELPWQTTKMTQTGDGMFYKESIFSPKVKQAKYVSPKTEKFVHDEVKNHSICLVEFTFMKKEKEVQETKFIDLKVIEHHQFLKEPESQLAKFLAEKETNSPIIHARIIRTIPKYQKIWIEHFPYYFISTRELHNARQFEISYELMEKVKQLSERSSVEELKIVFGLLIDQMNDNYPIYTKSSIQDRVQKFVDTQLYDFKSFEIGFEELKKAVAANAQRSDTFGSRISKKPKPEEVAIGYESITGLKYRKPRSVVGTKR

SEQ ID NO: 1132 - protein, 211 aa, Porphyromonas catoniae
MGKKVLGLDLGVGSIGWCLITLDKDEKPQSILGMGSRIVPLSADDATEFTQGKAITKNKMRTVARTIRKGMDRYQLRREALKKVLREHAMLPDEALIKLPLLELWELRARAATPGEQVSLTELGRVLLHINQKRGYKHAKADEAAEAETKKGKETGYVAQVKGRYQILKEKGLTIGQHFAGELRANQQTAPRGTYYTYRIKEQVYPRVRGV

SEQ ID NO: 1133 - protein, 1009 aa, Porphyromonas catoniae
MRIIREAYIEEYDRIMAVQRVFYPELLTDALIGRIRDRIIFYQRPLKSCKQLVSFCEFEKKEKVIRVKHTNKEGVQELVEKTITIGPKVAPKSSPIFQVCKVWESIHNIRLYHPDGTERKLEQEEKQKLFDYLQRNDKLSLTTLRKELKIKPKDKLWCDKLLEKGIAGNTTAAILRKAFKGYEHYERLFRFDLVRRDSHEADEDGVIRPIIDESYQNEPLYKLWHILYSIEDRAEMRSALIGQLGIKAEDLDNGLMDALYKIDFVKQGYGNKSAKFICKLLPHLQEGKMYSEAAEAAGMRHSDSMTAQERDERNLLEEIPLLQKNALRQPVVEKVLNQMINLVNALKREHGEIDEVRVELARELKMSREEREKATKNNSSREKENKAIAERITEYGLTPTKSRIQKYRLWQESAESCIYCGKRVDVVQFLRGEETEVEHIIPKSILFDDSLSNKACACRSCNQEKGNRFAMEYIQAKGWEQDYIERVDSLFHDKKISYSKRQHLLMLPKDLPEDFIERHLRLSQYISREAQGILRKGIRLVSASEGGVTAKLRQLWGYDNILRDLNLERYKSMGETEVVTVEHRDGQRTDERIKDWSKRKDHRHHAIDALVVACTRQSYIQRLNRVNAEADRQEMDAFIKEQQQEHKLSKKEKLSLLENWLKEQPHFTTGEVKEHAEGILISFRPGKRTVSRGRNIYKRSGKTDVQRNVLIPRGALSEETVYGVISVDGENKVVCKYPLQKFLDTKETNVDKIADQAAEKIVDKVLREKIRERIKRYGKKEAFAEPLYLDEAQTQVVRSVRCFISKDQAKLIPLRYNDESEAVGFVAPGNNHHLALYRDASGKMRASVVSFFAAVERARYGIPMIVLNPRETREKARIIPDLPESIFSKLPEEDWVLEETLQEGEMVLLGMENDAIEEAIKKKDYSKLSRYLYRVQSLSYNDYKFCFHLETESEKKEKKKGEDKKRGEKAKNTAVMPPKRYRIRCLATYQEDLNPRKVKIDLLGRISLA

SEQ ID NO: 1134 - protein, 1197 aa, Porphyromonas sp.
MLMSKHVLGLDLGVGSIGWCLIALDAQGDPAEILGMGSRVVPLNNATKAIEAFNAGAAFTASQERTARRTMRRGFARYQLRRYRLRRELEKVGMLPDAALIQLPLLELWELRERAATAGRRLTLPELGRVLCHINQKRGYRHVKSDAAAIVGDEGEKKKDSNSAYLAGIRANDEKLQAEHKTVGQYFAEQLRQNQSESPTGGISYRIKDQIFSRQCYIDEYDQIMAVQRVHYPDILTDEFIRMLRDEVIFMQRPLKSCKHLVSLCEFEKQERVMRVQQDDGKGGWQLVERRVKFGPKVAPKSSPLFQLCCIYEAVNNIRLTRPNGSPCDITPEERAKIVAHLQSSASLSFAALKKLLKEKALIADQLTSKSGLKGNSTRVALASALQPYPQYHHLLDMELETRMMTVQLTDEETGEVTEREVAVVTDSYVRKPLYRLWHILYSIEEREAMRRALITQLGMKEEDLDGGLLDQLYRLDFVKPGYGNKSAKFICKLLPQLQQGLGYSEACAAVGYRHSNSPTSEEITERTLLEKIPLLQRNELRQPLVEKILNQMINLVNALKAEYGIDEVRVELARELKMSREERERMARNNKDREERNKGVAAKIRECGLYPTKPRIQKYMLWKEAGRQCLYCGRSIEEEQCLREGGMEVEHIIPKSVLYDDSYGNKTCACRRCNKEKGNRTALEYIRAKGREAEYMKRINDLLKEKKISYSKHQRLRWLKEDIPSDFLERQLRLTQYISRQAMAILQQGIRRVSASEGGVTARLRSLWGYGKILHTLNLDRYDSMGETERVSREGEATEELHITNWSKRMDHRHHAIDALVVACTRQSYIQRLNRLSSEFGREDKKKEDQEAQEQQATETGRLSNLERWLTQRPHFSVRTVSDKVAEILISYRPGQRVVTRGRNIYRKKMADGREVSCVQRGVLVPRGELMEASFYGKILSQGRVRIVKRYPLHDLKGEVVDPHLRELITTYNQELKSREKGAPIPPLCLDKDKKQEVRSVRCYAKTLSLDKAIPMCFDEKGEPTAFVKSASNHHLALYRTPKGKLVESIVTFWDAVDRARYGIPLVITHPREVMEQVLQRGDIPEQVLSLLPPSDWVFVDSLQQDEMVVIGLSDEELQRALEAQNYRKISEHLYRVQKMSSSYYVFRYHLETSVADDKNTSGRIPKFHRVQSLKAYEERNIRKVRVDLLGRISLL

SEQ ID NO: 1135 - protein, 1422 aa, Prevotella denticola
MTQKVLGLDLGTNSIGSSVRNLDLSDDLKGQLEFFSSDIFRSSVNKESNGREYSLAAQRSAHSRSRGLNEARRRKLWATLDLLIKYGFCPMSPESLMRWRTYDKQRGLFREYPIDDKNFNAWILLDFDGDGKPDYSSPYQLRRELVIRQFDFDQPIERYKLGRALYHIAQHRGFKSSKGETLSQQETNSKQSLTDDTADVAGEMKASEEKLSKGLSTYMKENNLLTVGAAFAQLEDEGVRVRNNNDYRAIRSQFQREIETIFKFQQGLSVENELYERLVSEKKNIGTIFYKRPLRSQRGNVGKCTLERTKPRCAIGHPLFEKFRAWTLINNIKVRMSEEEQAEQLPMKLRFELYNDCFLAFVRAEFKFEDIRKYLEKRLGVHFSYNDKTINYKDSTSVAGCPITARFRKLLGEDWESFHVDGQKQRQAHGKNNASFHTVSYSTNDIWHFCYDAEEPEAVLSFAQDNLKWEKKKAEELVRIWSAIPQGYAMLSQKAIRNINKMLILGLKYSDAVLLAKVPEIVEITDGEILSVTEDYHRVEAQVGYEKQINNIVNALIAKYKSASEEYRFADHNYEYQLDKSDEKDIIKQIESNIGTRKWSLLDADEQTDILQKVRDKYQNFFRSHERKFVESPKLGECFEEYLMKKFPMVEGERWKKLYHPSQIAIYRPVPANKDRSALRLGNPDIGAIKNPTVLRVLNTLRKRVNQLLDDGIISPDETRVVVETARELNDANRKWALDTYNRIRHDENEKIKKILAEFYPKRDNISTVDIDKARYVIDQREMDYFTEAKTYHKDIKKYKLWLEQGGQCMYTGRTINLSNLFDPNSFDVEHTIPESISFDSSDMNLTLCDAHYNRFIKKNHIPADLPNYDKSVVIDGKEYSPIKPRLQRWADRVERLNRNVEYWRGQARRAQNKDRKDQCMREMHLWKMELEYWTKKLERFTITEVTDEFKNSQLVDTRVITRHAVLYLKSIFPHVDVQRGDVTAKFRKILGIQSVDEKKDRSLHSHHAIDATTLTIIPGAAKRERMLELFAKIEEVNKMLSFSGNEDRTGLKQELDGLKNQLNKEVKACRIGHNVSEIGTFINDNIIINHHVKNQALTPVRRRLRKRGHIVGGMDNPRWQTGDALRGEIHKASYYGAITQYAKDKEGKVLMKEGRPQINPTIKFVIRRELKYKKSSTDSGFASWDDLGKAIVDKELFALMKGQFPEGTSFKDACEQGIYMIKKGKNGEVDTKLYRIRHIRCKTKQKNALKIKEQAYKSEKEYKRYFYAAVGDLYAMCCYTNGKTREFKIYSLYDISCHRKVGVEDIPEFITDKKGNRLMLDYKLHTGDMILLYKENPEELYDLDNVSLSKLLYKINGFENDGLRIRMVNHLVAKEAMGESVKDYAKLPDIIRCGVKTIKFLVMGENRDFVIKNGKISFNHR

SEQ ID NO: 1136 - protein, 443 aa, Prevotella disiens
MELDYWKGKYNRFTMTEIPEGFSRRQGMGIGLISRYAGLYLKTIFHKKDNPQKSNVYIVKGSITAEFRRIWNIQDDYEKKCRDNHIHHCIDAIVVGCIGKREYDLMAQFYRDEEKYRWEKKKKPFFKKPWETFTQDMLSLKDEVLTVHFNPSNFTKKAHKKVFTPKGIFVAQGDCARVKLHKESYFGAIEQKGEIKYVMRKELSALKIEDIKNIVDAVVKEKVLAVVKKKGFKQAMAEPIYMNEDKRILIKKVRLFVSQTNPLIVKKHRDLSSKEYKQNYYVDNEGNLMIAMYEGVKKNGKIDREITVVNNLEAAKFFRQSQKNNAEKQLISHLSPKNGYPLKTVLTQKQLVLMYEDSPKEIKLRDTKNMVKRLYQVVEIEKDGRVKLKFHQEARSEGLNKNSAAFKIQDTPESLYRHTKSNLKVLVNGVDFKINILGEISLI

SEQ ID NO: 1137 - protein, 1375 aa, Prevotella histicola
MKKILGLDLGTTSIGWALVYESENTDEKSSIVRLGVRVNPLSVDEKGNFEKGKAITTNADRQQTHGARINLQRYKLRRENLKDCLQKQGWIGTEALCEEGKTSTFETYMLRAKAAEEEISLHELCRVLFMMNKKRGYKSNRKANNKEDGKLFDGMTVAKKLYEEHLTPAEYSFQLLSSGKKFKQEYYRSDLKEEFDRIWNEQQKYYPEILTDDFKQQLQGKSKGNTSKIFLGKYGIYSADLKGLDRKLQPLKWRVEALKQQVDKEVLAFVISDLNGQIASTSGLLGAISDRSKELYFNKQTVGQYLWTSLKETPHVSIKNKPFYRQDYLDEFEKIWETQATYHKELTPELKQEIRDIIIFYQRPLKSKKGLISVCELEQRKVKVTIDGKEKEISIGPKVAPKSSPMFQEFRIWQNLNNILLIDKGNNSIHPLYEEEKNLLYEELSVKEKLSKAEALKVLNKNSKQWDLNYKEIEGNRTQAVLYDCYNRIIVMTGHEEYNFKKLKASEIRSYVKTTFTGLGFNTDILEFDSSLTGHELEKQPMYQLWHLLYSYESDNSRTGNDALLRKLETAFGFPKEYAAVLSDVVFEDSYGNLSVKAMRKILPHLQAGLNYSQACEEAGYKHSRRSLTKNELDQKEYKEKLELLPKNSLHNPVVEKILNQMINVINAVIDEYGKPDEIRIELARELKIGAAERENMTRSINQGNAENKRIREILEKEFALSYISRNDIIKYKLYEELKSNGFKTLYSDTYISKDKLFSKDFDIEHIIPKARLFDDSLSNKTIEARDVNIAKSNKTAFDFISEKYDQQGIEAYKKKLDILLQDGSISKAKYNRLLMKEADIPSGFIDRDLRDTQYIAKKAYEILSDLVRNVTPTTGAVTSRLREDWQLVDVMKELNFEKYQKLGLVEVIEDRDGRKIKRIKDWTKRNDHRHHAMDALTIAFTKPSYIQYLNNLNARSDKNSSIYGIENKELHREDNKLRFNAPLPINEFRAEARRHLKSILVSVKAKNKVMTQNVNVIKTKHGVIKKVQLTPRGELHNATFYGTKKRPIIKMVKVGAALDEVTIKKVSSSFIREALLDRLHEYNGDAKKAFTGRNSIDKNPIYIDEEHKKTVPALVKTIEWEMYHPTRKLISPDLKIDKVIDKGIREILKTRLAKFNGDAQKAFSNLDENPIYKDEAKKITLKRVSLEGVSSVIPLHTLKDREGKLVVGKDGKPVLGDYVQTSNNHHIAFYMDENGNLQDNVVSFFEAAERKSQGVPVIDKNYNHDKGWNFLFTMKQNEYFVFPNEVTGFNPSEVDLMDEANYSIISPNLYRVQKMSKASGRDYWFRHHLEAMLNDDPKLRNSMFKRITSLKALEGIVKVRINCIGKIVAVGEYD

SEQ ID NO: 1138 - protein, 1380 aa, Prevotella intermedia
MKRILGLDLGTTSIGWALVNEAENNNEASSIVRLGVRVNPLTVDEKSNFEKGKAITTNADRQLRHGARINLQRYKLRRQNLHDCLQKQGWLGTEAMYEEGKASTFETYKLRAKAAEEEISLHEFARVLFMLNKKRGYKSNRKANNKEDGQLFDGMTIAKKLYEEHLTPAEYSLQLLNKGKKFTQGYYRSDLNAELERIWDEQKKYYPEILTDEFKQQLEGKTKTNTSKIFLAKYGIYSADLKGLDRKFQPLKWRVEALQQQVDKEVLAFVISDLKGQIANTSGLLGAISDRSKELYFNKQTVGQYLWASLEENPHISIKNKPFYRQDYLDEFEKIWETQAAFHKQLTPELKQEIRDIIIFYQRPLKSKKSLISVCELEQRKVKATIDGKEKEITIGPKVAPKSSPVFQEFRIWQNLNNVLLIDNDTNEKRPLDEVERNLLYKELSIKAKLSKTEALKILNKKGKQWDLNYRELEGNRTQAILFDCYNRIITLTGHEECDFKKIKASEIRHYVSTIFKNLGFSTEILDFDPSLKKHELEKQPMYQLWHLLYSYESDNSRTGNESLLRKLETTFGFPEEYATVLCDVVFEEDYGNLSVKAMREILPYLQAGNDYSQACAYAGYNHSRHSLTKEELDQKVYKERLELLPKNSLRNPVVEKILNQMINVINAIIDEYGKPDEIRIEMARELKSSAADRKKTTHAISQGNAENQRIREILEKEFSLSYISRNDIIKYKLYEELEPNYYKTLYSDTYITKDKLFSKDFDIEHIIPKARLFDDSFSNKTLEARNINLEKSNKTAFDFIKEKYGEDGAEAYKKKLDMLLENDAISRPKYNNLLRAEADIPSDFINRDLRNTQYIAKKACEILGELVKTVTPTTGKITNRLREDWQLVDVMKELNFEKYEKLGLTEIVEDRDGRKIKRIKDWTKRNDHRHHAMDALAIAFTKPSFIQYLNNLNARSNKGDSIYAIENKELHYEEGKLRFNAPIPVNEFRAEAKRHLSAILVSIKAKNKVMTQNVNKIKTKHGIIKKIQLTPRGPLHNETIYGTKMRPIIKMVKVGAALDEATINKVSSPAIREALLKRLNEYSGNAKKAFTGKNTLEKNPIYLNAGRTKTVPSLVKTVEWESFHPTRKLIDKDLNVDKVVDKGIREILKARLEEFNGDAKKAFSNLEENPIYLDEAKKIALKRVSIEGVLSAIPLHTLKNQAGKPITGKDGKPVLGNYVQTSNNHHIAFYYDEDGNLQDNAVSFFEAAERKSQGIPVIDKDYNRDKGWRFLFTMKQNEYFVFPNEATGFIPSEVDLTDEANYGIISPNLYRVQKVSRIDKGTSASRDYWFRHHLETILNDDAKLKNLAFKRIRGLLELKDIIKVRINSTGKIVAVGEYD

SEQ ID NO: 1139 - protein, 129 aa, Prevotella multiformis
MQKGGTGCKINRQTVGNVEVNVLNLRLYDRTDDREVTAGYLPTKEDYVRLFVYLNDRKEINQDTLLKDYFRLKKVKCGNEKEFAIRWNYIEDKEKKYPCNETRHELLAALDRAGMEHGWLDDSGTSARW

SEQ ID NO: 1140 - protein, 535 aa, Prevotella multiformis
MVKGLLSNIVRTAEEREETSKFVISCTGRITDRLKQDWGLNDVWNSLVYTRFKRLNELTETEAFGHWQDKDRRVFQTSVPLELQRGFSKKRIDHRHHAMDALVIACASRNIIGYLNNESAESPEKREDLRRKLCDKNHIIRKPWESFTQDARAALEDIVVSFKNYVRIINKATNYYERYDADGRKTKAEQKGGEMWAVRKPMHEATYYGKVNLRRKERVSLKAALEDIPSICNRDLRDYINGLVEKHFNKEQVLAQFRSVGNRWNKQHIDKVDVWRFSDGKEEMVATRKPLDTSFDAKRIEAVTDTGIQRILSNYLEAKGGDPKIAFTPEGIADMNQHITAYNNGKQHKPILKVRVSTKLGKKYPVGQTGCKAGQFVVAEAGTNLYFAVYEDGEGNRSYDTIPLNEAVECLKQGLPPVPETREKGDRLKFYLSPNDLVYVPAGDEENEIDRERIYKFVDSSGTTANFIPHRTAGLIYNVDKKLAEALCNGSIIQNEYGVGSQQSKNQKALTGEMVKAVCWKLEVDRLGNILRIIK

SEQ ID NO: 1141 - protein, 1380 aa, Prevotella nigrescens
MKRILGLDLGTTSIGWALVNEAESNNEASSIVRLGVRVNPLTVDEKSNFEKGKAITTNADRQLRHGARINLQRYKLRRQNLHDCLQKQGWLGTEAMYEEGKASTFETYKLRAKAAEEEISLHEFARVLFMLNKKRGYKSNRKANNKEDGQLFDGMTIAKKLYEEHLTPAEYSLQLLNKGKKFTQGYYRSDLNAELERIWDEQKKYYPEILTDEFKQQLEGKTKTNTSKIFLAKYGIYSADLKGLDRKLQPLKWRVEALKQQVDKEVLAFVISDLKGQIANTSGLLGAISDRSKELYFNKQTVGQYLWASLEENPHISIKNKPFYRQDYLDEFEKIWETQATFHKQLTPELKQEIRDIIIFYQRPLKSKKSLISVCELEQRKVKATIDGKEKEITIGPKVAPKSSPVFQEFRIWQNLNNVLLIDNDTNEKRPLDEDERYLLYKELSIKAKLSKTEALKILNKKGKQWDLNYKELEGNRTQAILFDCYNRIITLTGHEECDFKKIKASEIRHYVSTIFKNLGFSTEILDFDPSLEKHELEKQPMYQLWHLLYSYESDNSRTGNESLLRKLETTFGFPEEYATVLCDVVFEEDYGNLSVKAMRKILPYLQAGNDYSQACAYAGYNHSRHSLTKEELDQKVYKERLELLPKNSLRNPVVEKILNQMINVINAIIDEYGKPDEIRIEMARELKSSAADRKKTTHAINQGNDENQCIREILEKEFALSYISRNDIIKYKLYEELKPNGFKTLYSDTYIPKDKLFSKDFDIEHIIPKARLFDDSYSNKTLEARDINLAKSNKTAFDFVKEKYGEQGAEAYKKKLDMLLGNNVISKPKYNKLLMTEADIPSDFINRDLRNTQYIARKACEILGELVRTVTPTTGKITNRLREDWQLVDVMKELNFEKYEKLGLTEIVEDRDGRKIKRIKDWTKRNDHRHHAMDALAIAFTKPSYIQYLNNLNARSNKGDSIYAIENKELHYEEGKLRFNAPIPVNVFRAEAKRHLSAILVSIKAKNKVMTQNVNKIKTKHGIIKKIQLTPRGPLHNETIYGTKMRPIIKKVKVGAALDEATINKVSSPAIREVLLKRLNEYSGNAKKAFTGKNTLDKNPIYLNAERTKTVPASVKTVEWENYHPIRKPITPDLKVDKVIDKGIGEILKARLEEFNGDAKKAFSNLEENPIYLDQTKKIALKRVSIEGVLSTIPLHTLKNQAGKPIMGKDGKPVLGNYVQTSNNHHIAFYYDEDGNLQDNAVSFFEAAERKSQGISVIDKDYNRDKGWRFLFTMKQNEYFVFPNEATGFIPSEVDLTDEANYGIISPNLYRVQKMSRIEKGTSVSRDYWFRHHLETILNDDSRLKNSAFKRINSLKPLEGIIKVRINSIGKIVAVGEYD

SEQ ID NO: 1142 - protein, 1506 aa, Prevotella nigrescens
MKTILGLDLGPNSIGWAKVEVDDEGNYLRNIKLGSRIIPMTQDMLGDFDKGVKVSQTAIRTDFRGNRRLIERHLLRRERLHRVLHALKFLPKHYEDAIGWDRNEPATYGKFVNNSEPKLAWERQEDGSMRFLFMESFNEMVADFAQNQPSLVSDGKKIPLDWTIYYLRKKALTRPIKKEELAWILLNFNQKRGYYQLRGEEEEDNLTKRKEYYKLKVVGVEADGAPKGGKTWYNIHLENGWTARCQSKIPLDDWVGKVKEYIVTTEYEDDGKTPKCDKEGKVKRSFKSPEKDDWQLIKTRTEKFIDDSNKTVGAFIYDYLLEKPFDKIRGKYIRTIERKYYKNELREILREQTKYHEGLHSLEALKICAEELYKNNQQHQEYLLKKDMTFLLLNDLIFYQRPLKSKKSLIADCPYEVYKYDDKLTGKKGQKKIKCIAKSNPYYQEFRLWQFIANLRLFSVTDGKEVTAEYLKTEEDYVRLFSFLNDRKDIKQETFLRSFLKLKKESIGSEKIYPIRWNYIEDANKSYPCNATRHELLLAFDRADIPRELLDVEEREYRLWHLLYSIEAKEETESALRKLKANKAFGDLNIDDAFVNSFLKIKPFEKEYGAYSEKAIKKLLAVMRRGSLWKEADICEATKQNIAKILQNDIDEKLKKKIEAAVSSFNKLSDFQGLPTWLACYVVYGRHSEAAQIQCWQSPEDLKTYINKFKQHSLRNPIVEQCLLETLRTVYDIWKDAGQIDEIHIELGRNMKSTAEQRARKTKDILRNENTNLRIKNLLVELKNDDKIENVRPYSPSQQEILRIYEEGALQELSKEDEMFEDISKISKMAQPSPTELSRYKLWLEQKYRSPYTGRVIPLSKLFTTAYQIEHIIPQSRYFDDSFNNKVICESEVNSLKDNMLGYEFIKECGGRIVHCTLLGDVKIFTKEEYKDFVTKHYIDNTYKRDKLLLEDIPQEFSARQLNDSRYISKMVQTVLSNIVRAENEQEATSKFVVSCNGAITNRLKKDWGLNDVWSSIVCPRFKRLNEITKTNAFGHWEDKAGKHVFQTTVPLELQRGFSKKRIDHRHHAMDALVIACASRNIVNYLNNESANSPEKREDLRKKLCDEKRKIRKPWKTFTQDAREALSDVVVSFKNYVRVINKATNYYEHYSSSGNKVMISQKGNDMWAIRKPLHKESVFGRVNLCRKVIVSLKKALENIPAICDKTLRDYINALVEKHFNTRQLLAHFKSINYRLNRQCVEKVEVWQFSDEKIEMVARRKSLDTSFDDKQISSITDTGIQKILLNYLQTKDGNAEIAFTPEGIEEMNKNISLYNDGKAHQPILKVRVATPKGMKYPVGQTGNKATKFVVAEKGTNLYFAIYENELGVRSYDTIPLNIVVERLKEGLSPVPQANEADIPLKFYLSPNDLVYVPTKENEDELCRDRIYKFVDSSGTTANFVPHTSANTIYNVDKEYAEKCCNGAVFLNEYGLGSPQSKNQRALTGEMIKEICWKLKVDRLGNIIKVIK

SEQ ID NO: 1143 - protein, 774 aa, Prevotella oulorum
MEQCILETLRTVYDIWKEAGQIDEIHVELGREMKQTAEQRAHLTEKVLRNENTNLRIKSLLMELKNDADMKDVRPYSPMQQEILRIYEEGALQTLSKDDAAFTEIMKISKMAQPSASELQRYRLWLEQKYRSPYTGKPISLSKLFTSAYQIEHIIPKKRYFDDSFSNKVICEAEVNGKKDSMLAYEFIKDCGGDVIHCTTLGDVTILSEAEYKALVTELYANNKSKKDKLLMEDIPQDFINRQLNDSRYISRVVMTLLSNIVRIEGEEEATSKFVIPCSGGITDKLKKDWGLNDVWNNIVYPRFERLNALTNTSDFGQWENKEGKRVFQTSVPLELQRGYQKKRIDHRHHAMDALVIACASRKIINYLNNQEANDPTKQENARKQLCIKSRIIRKPWETFTQDAYKALDNIVVSFKNYVRVINKATNYYERYNADGKKAVDEQKGEAMWAIRKPMHKDTVFGHVNLRRKAVVKLKDALENIPAICDKTLRHYIQDLQKKHFNTKQLLAHFKSINYRLNKQAVDKVEVWQYSDDKEQLAATRKPLGPSFDAKCIAAITDTGIQKILLNYLQAKGGDPAIAFTPEGIAEMNQNIAVYNGGKQHQPILKVRIAKPMGKKFPIGQTGNKAFQYVIAEEGTNLYFAIYEDEEGNRTYDTIALREVVERLKQGLTPVPEKNEKGVALKFHLSPNDLVYVPTADELLSKVCSLDKNRIYKMVSATKSECLFIPHSVAKTIYDKVEFEALNKMGRALTGEMIKSVCWKIEVDRLGHIVNIIK

SEQ ID NO: 1144 - protein, 691 aa, Prevotella oulorum
MKTILGLDLGTNSIGWAKVIVDDNENYLRDIQLGSRIIPMSQDVLGKFDKGVTESQTAIRTSFRGVRRLRERTLQRRERLHRVLHTLHYLPPHYDSAIGWDRKTPTTYGKFLNHGEPKLAWERREDGTMQFLFMDAFHEMIADFAKYQPALVADGKKVPLDWTIYYLRKKALTQPIKKEELAWILLNFNQKRGYYQLRGEEDEENAAKHEEYHELKVVGVEVDEAGKGDNTWYNVKLENGWTYHRQSKIPLDDWVGKVRAFIVTTEYEKDGTTPKKDKEGNVKRSFRSPDEKDWGLRKKQTEHSLEASGTPVGAFIYDHLLKEPSDKIRGKFIHTIERKYYKQELAAILREQSKHHEKLCSKDMLKACIEELYPNNPLHRESLLKKDMPYLLIEDLIFYQRPLKSKKSLIAECPYEAYSYVDKETGEMKRQGIKCIAKSNPYYQEFRLWQLIANLRLRNRSDERDVTAEYLPHQEDYVRLFTYLNDRKEINQETLLKDFFKLKKVTIGGEKVFPIRWDYIEDKEKKYPCNATRHELLLALDRAGIEHDWLNDRDLAYRLWHLLYSVDSKDETERALRKLKDDDAFVESFLKIKPFEKEYGAYSEKAIKKLLPVMRRGSLWNEADLCPSTKERIANILQGTIDEKLKKKIGAFISSCQQVSDFQGLPEWLACYVVYGRHSEATDIQRWETPE

SEQ ID NO: 1145 - protein, 242 aa, Prevotella saccharolytica
MKLVLGLDLGVGSVGWALIFITDSGEPIKILALGERIVSMDSNNSNEFSAGATCTLNQKKTKAKSVRKGYSRYVQRRDALTAELRHIGMMPDETLIKLPVLDLWQLRANAATEGKKLSLAEIGRVLYHINQRRGYKHGKSDVSSDNKQKGYVKAVNERYCMIQERQQTIGQYFALKLKETAVTTEKGTFYTFRIKDQVFPREAYEEEFVVAYSTKVLKFKQITTLLNVVICLMMLLLIVQRY

SEQ ID NO: 1146 - protein, 1174 aa, Prevotella sp.
MEFHPELCDAELLKACAEELYRNNEAHRAQLLAKDFKHLLVEDVLFYQRPLKSKKSLIANCPYETRQYINKETGEIKDVNVKCIAKSNPYFQEFRLWQWISNLRLLRQADGQDVTAAYIKGNEDKERLFDLLNNQGEIKQEHILRDFLKLKKPKGGEFPLRWNYVDDKIYPANETRHAINKAIKGMAVDKEEKETLGQLLDQPAVAYMLWNLLYSITDRNELARALRRFALTHGVSSVDAFVESFLKVKPFKKEYGAYSEKATKKLLQVMRLGKYWCGDELPEPAKRTKGNKQAVYDEMAHRGICKQTLQNISNIIEENIDERLMGALLNPERPLTELSHFQGLSVSDACYVVYGRHSEVAEIVKWKDADELNTFINNFKQHSMRNPIVEQCVLETLRTVRDVWEQEGQIDEIHVELGRNMKRTAEQRARDTQAIQRNENTNMRISLLLTELKNDPSISDVRPYSPSQRELLKIYEEGALENLTNQDEDIAKISRLAQPSASELRRYKLWLDQKYVSPYTGRPIPLAKLFTPAYEIEHIIPQSRYFDNSFSNKVICEAEVNKLKDNLLGMEFIKKFGGKTKGILDEEAYKLHVTTNYAHNPAKRSKLLMEDLPTDFNSRQLNDTRYISKTVMALLSNVVREEGERETRSKHVVVCTGGVTDTLKKDWGLHDVWHNLVYPRFIRLNNLTGSQNFGYWRYLNEENSKKGEDSKKVFQITLPPECQRGFVKKRIDHRHHAMDALVIACASANIVNYLNNQSAANPHIHENLQRLLCDRKREIRKPWPTFTQDAQAALKDLVVSFKNTVRVVNKASNTYLRYDKDGKKKRFKQEGEGLKAIRKPMHKETYYGEVNLIRKEMVPLKRALDDVNAIVDKELRASIKGLLRDGFNPQQVLANFKAKDFKFDKRDIKKVEVYVSSEKSTPMVATRKSLDTSFNAKRIADITDTGIQKILLNYLKANDNSPEQAFTPEGIAYLNEHIAEYNDGKPHQPILKVRVSEVKGAKFAVGQTGSKKDKFVEAQSGTNLYFAIYEDKEGKRHFETIALKVAAERLKDKQMPVPEINDAGLPLKFYLSPNDLVYVPTDEDRATAHPSIDKMRIYKMVSATDRQCFFLPFTVASVISNKVEFEALNKMERVLDASEYSSAYDSSHVNKVMVKNVCWKLEVDRLGNITKIVR

SEQ ID NO: 1147 - protein, 992 aa, Prevotella sp.
MITRILGLDTGTNSLAWAVVDRDANGNYTLVKRGDVIFTEGVKIEKGIESSKAAERTAHKALRVHYSRRRLHKIDTLKVLVELNLCPCLSDEQLSQWKAKKTYPLTDDFMLWQRSGSAEENNPYYCRHRCLTQKLDLTDQSQRFLLGRAFYHLAQRRGFLSNRLDTSADSDESGKVKSGIAQLSVEMEKAGCEFLGEYFYQLYKQHGNTIKLRSRYTDREEHYKKEFLAICEKQELDPKWVEALQRAIYFQRPLKSQRKGVGKCTFEPKKPRCAESHPDYEAFRMLCFLNNVKIQTPNDTSLRPLNEDEREKIWPIFFRKSKPNFDFEDIAKALAGKNNYAWYKDAGEKPFKFNYRMQQGVSGCPVTAQLIDIFGSDWQTAIAETYTAVEKKNGTKTIDEMADDVWNVLYSFSSKDKLKAFATEKLQLDEASATKFANAKLPHGFASLSLKAIRNILPFLRQGFIYAHAVHLAKIPDIVTKAVWNDADKREMILSGLMEIIENYNPKDRGVEGTIDFCIKSHLQDVIDLRPGAADALYHPSMIETYPDAKLNKMGVFQLGSPRTNAIRNPMAMRSLHILRSVVNQLLRDGIIDRDTEVHVEYARELNDANKRKAIADYQREQEKKRKQYRDDIIALYKSECHKEIEPTDTDILKFQLWEEQNHLCLYTGTQIGICDFLGDNPKFDIEHTVPRSVGGDSTQMNLTLCDATFNRQVKGAQLPSQLSNHADILVRIDHWKSKCEDLRKQLDKIRTYGGMEKNMKDRLIQKRHRLKMDLDYWQGKYSRFTMTEVPEGFSRRQGAGIGLVSKYAGLFLKSLFHNEQNPNKSNVYVVKGVTTAEFRRMWGLQGEYEKKSRLNHCHHCIDAITIACIGKAEYDKMAQYYHDEELFQWRGTTTKPHFNKPWPTFTEDVLAIEQSLLVKHLTKDNMPKQAKKRVRTATGKYLAQGDTARGSLHKDTYYGAIEQNGEIRYVLRKPLNKFENEAELEKIVDQA

SEQ ID NO: 1148 - protein, 1375 aa, Prevotella sp.
MKKILGLDLGTTSIGWALVNESENKDEQSSIVRLGVRVIPLTVDEKGNFEKGKAITTNADRQQVHAARINLQRYKLRRENLRDCLQKQGWIGSEPMCEDGKSSTFETYKLRAKAAVEEVSLHEFARVLFMLNKKRGYKSNRKANDKEEGKLFDGMTIAKKLYEEHLTPAEYSLQLLNTGRKFTPEYYRSDLIEEFEKIWNEQQKYYPEILTDEFKQQLEGKAKSNTSKLFLGKYGIYSADTKGLDRRLQPLKWRVEAMKQQVDKDVLAFVISDLKGQIANTSGLLGAISDRSKELYFSKQTIGQYLWASLQENPHISIKNQPFYRQDYLDEFEKIWETQATYHKELTSELKQEIRDIIIFYQRPLKSKKNLIAVCELEQRKVKVTVDGKEKEITIGPKIAPKSSPMFQEFRIWQNLNNILLLDHETNSKRPLYEEERNLLYEELSVKEKLSKTEALKVLGKKSKQWDLNYKELEGNRTQAVLYDCYNRIIVMSGHEECNFKKLKASDIRHYVKMIFKNLAFNTDILCFDSSLKGHELERQPMCQLWHLLYSYEGDNSRTGNDALLRKLETSFGFPKEYAAVLADVIFEDSYGNLSVKAMRNILPHLQAGKDYSQACEEAGYKHSRRSLTKEELNQKVYKEKLELLPKNSLHNPVVEKILNQMVNVINAVIEEYGKPDEIRIELARDLKIGAAERENMTRSINQGNAENKRIREILEKEFALSYLSRNDIIKYKLYEELKSNGFKTLYSDTYISKDKLFSKDFDIEHIIPKARLFDDSLSNKTIEARDVNIAKSNKTAFDFILERYGEQGVKTYKTKLLRLLEDGAISNKKYNNLLKTEADIPSGFIDRDLRNTQYIAKKAYEILSELVKIVTPTTGSVTNRLREDWQLVDVMKELNFEKYQKLGLADVIEDRDGRKVKRIKDWTKRNDHRHHAMDALTIAFTKPSYIQYLNNLNARSDKSSSIYGIEVKELHREEGKFRFNAPLPINEFRAEAKRHLKSVLVSIKAKKKVMTQNVNKIKTKHGIIKKVQLTPRGELHNATYYGTKKRPLVRMVKVGAALDEATIKRVCSPAIRAALLKRLNAYNGDAKEAFTGRNSIDKNPIYLDIEQTKLVPVLVKTIEWGMYHPIRKRITPDLKIDKVIDKGIREKLKARLAEFNGDAQKAFSNLDENPIYMDEAKRITLKRVSIEGVLSAIPLHTLKDKAGKPVIGSDGKPVFGDYVQTSNNHHIAFYIDDKGNLQDNPVSFFEAAERKSQGVPVIDRRYNCDKGWHFVFTMKQNEYFVFPNEATGFIPSEVDLLDEANYCIISPNLYRVQKLSKASGRDYWFRHHLETMLNDDLRLKNSTFKRIQSLKGLEDIVKVRINSIGKIVAVGKYD

SEQ ID NO: 1149 - protein, 1483 aa, Prevotella sp.
MKTILGLDLGTNSIGWAKVSVDDYGNYLHDIKLGSRIIPMSQDVLGNFDSGVTVSQTAQRTEFRSKRRLVQRNLQRRERLHRVLHVLDFLPAHYDAAIGWDRTEAVTYGKFLNHAEPKLAWEELGNGKRRFLFMDSFHEMVADFARCQPALVADGKKIPLDWTIYYLRKKALTQAITKEELAWILLNFNQKRGYYQLRGEEEEENPTKQEEYYELKVVSVEATDSRKGNDTWYNVHLENGWIYRRSSKISLDDWVGKVKQFIVTTEYEKDGTTLKTDKEGNVKRSFRAPNENDWGLRKKRTETLLEMSGKTVGAFIYDHLLQEPADKIRGNFIRTIERHYYKAELEAILAEQCKYHIELRDKEMLEACARELYLNNLPHQRSLMKKDMTYLLLYDLIFYQRPLKSKKALIANCPYEYYEYVDKETGEIKRQNIKCIAKSNPYFQEFRLWQFVLNLRLFDRVEDKEVTANYLPTADDHARLFTYLNDRKEINQETLLKDYFKLKKVKIGNEKEYPIRWNYIEDKEKKYPCNETRYELLMALDRAGIEHKWLDDNNLEYRLWHLLYSVEVKSESETALRKLKNDDAFVNSFLKVKPFKKEYGAYSEKAIKRLLAVMRKGFLWNEQDICDETRKRIEIIIKGDVDEKVKERMGHAAYSFDRVSDFQGLPEWLACYVVYGRHSEAMDIQRWDSPERLMAYINNFKQYSLRNPIVEQCILETLRTVHDIWKETGQIDEIHVELGREMKSTSEERARRTQNVLRNENTNLRIKSLLIELKNDTDICNVHPYSPMQQEILRIYEEGALQELNREDEDFEEISKISQMSQPSGKELNRYKLWLEQKYRSPYTGKAISLAKLFTPAYQIEHVIPQSRYFDDSFTNKVICEAEVNTLKSNLLGYEFIKKHGGEIIHCTTLGDVRIFSESEYKAFVMDHYANNKSKKDKLLMEDIPQEFLSRQMNDSRYISKVVKTLLSNIVRMADESEATSKSVIVCTGGVTDRLKKDWGLNDVWNSIVYSRFERLNRLTGTEAFGHWENKDGKRVFQTSMPLELQRGFRKKRIDHRHHAMDALVIACASRNIVNYLNNESANNPKKREDLRRQLCDKNRVIRKPWETFTQDAYNALENVVVSFKNYVRVINKATNRYEHYDENGKKRFVQQKGSELWAIRKPMHKETYYGHVNLRRKELVTLQKALDDIPSICDKKLRDYISALVEKHFNKRQLLAHFKSTDYYWQKQYVNKVYVWTFSDDIKPLVATRKLLDTSFDAKRIGTITDTGIQKILRNYLEAKGGNATLAFTPEGIVEMNQNISKYNDGKPHQPILKVRITEPMGAKYRVGQTENKMAKYVEAQSGTNLYFAIYEDSEGKRSYTTVPLDEVAERLKQRLSPVPEKDENDVPLKFYLSPNDLVYVPTEEELQLRECKLNKDRIYKMVSSTGSECHFIPYYVANVIYNKVEFEAKNKIGRALTGEMIKAVCWKLEIDRLGNILKVIK

SEQ ID NO: 1150 - protein, 593 aa, Prevotella sp.
MNTRILGLDTGTNSLAWAVVDRDAKGNYTLVRRGDVIFTEGVNVDGQPVPSKAAVKSKYKSLRVQYARRRLRKIDTLKVLVSLDLCPYLSDQQLSQWKAKKTYPLTDDFMLWQRSGSAEENNPYYCRYRCLTQKLDLTDQSQRFLLGRAFYHLAQRRGFLSNRLDTTSDSAESGKVKSGIAQLSVEMEKAGCTFLGEYFYQLYKQHGNTVRLRSRYTDREEHYIKEFLAICEKQELDAQWVEKLQRALYFQRPLKSQRKGVGKCTFEPKKPRCAESHPDYEAFRMLCILNNIKIKTPKDVSLRPLNAEEREKVWPLFFRKSKPNFDFEDIAKALAGKNNYAWYKDAGEKPFRFNYRMHQGVSGCPVTAQLIDIFGSDWKAGIAETYTAVGKKNGTKTIDEMADDVWNVLYSFSSKDKLKAFATDKLQLDEARATKFANAKLPHGFAALSLKAIRNILPFLRQGFIYAHAVLLAKIPDIVTAAVWDDADKREQILSGLLEVIENYNPDDRGIEGTIDFCIKSHLQDVVDLRPGAADALYHPSMIEAYPDAKLNKMGVFQLGSPRTNAIRNPMAMRSLHILRSVVNLLLRDGMLS

SEQ ID NO: 1151 - protein, 1424 aa, Prevotella sp.
MTQKVLGLDLGTNSIGSAVRNLDLSDDLQWQLEFFSSDIFRSSVNKESNGREYSLAAQRSAHRRSRGLNEVRRRRLWATLNLLIKHGFCPMSSESLMRWCTYDKRKGLFREYPIDDKDFNAWILLDFNGDGRPDYSSPYQLRRELVTRQFDFEQPIERYKLGRALYHIAQHRGFKSSKGETLSQQETNSKPSSTDEIPDVAGAMKASEEKLSKGLSTYMKEHNLLTVGAAFAQLEDEGVRVRNNNDYRAIRSQFQHEIETIFKFQQGLSVESELYERLISEKKNVGTIFYKRPLRSQRGNVGKCTLERSKPRCAIGHPLFEKFRAWTLINNIKVRMSVDTLDEQLPMKLRLDLYNECFLAFVRTEFKFEDIRKYLEKRLGIHFSYNDKTINYKDSTSVAGCPITARFRKMLGEEWESFRVEGQKERQAHSKNNISFHRVSYSIEDIWHFCYDAEEPEAVLAFAQETLRLERKKAEELVRIWSAMPQGYAMLSQKAIRNINKILMLGLKYSDAVILAKVPELVDVSDEELLSIAKDYYLVEAQVNYDKRINSIVNGLIAKYKSVSEEYRFADHNYEYLLDESDEKDIIRQIENSLGARRWSLMDANEQTDILQKVRDRYQDFFRSHERKFVESPKLGESFENYLTKKFPMVEREQWKKLYHPSQITIYRPVSVGKDRSVLRLGNPDIGAIKNPTVLRVLNTLRRRVNQLLDDGVISPDETRVVVETARELNDANRKWALDTYNRIRHDENEKIKKILEEFYPKRDGISTDDIDKARYVIDQREVDYFTGSKTYNKDIKKYKFWLEQGGQCMYTGRTINLSNLFDPNAFDIEHTIPESLSFDSSDMNLTLCDAHYNRFIKKNHIPTDMPNYDKAITIDGKEYPAITSQLQRWVERVERLNRNVEYWKGQARRAQNKDRKDQCMREMHLWKMELEYWKKKLERFTVTEVTDGFKNSQLVDTRVITRHAVLYLKSIFPHVDVQRGDVTAKFRKILGIQSVDEKKDRSLHSHHAIDATTLTIIPVSAKRDRMLELFAKIEEINKMLSFSGSEDRTGLIQELEGLKNKLQMEVKVCRIGHNVSEIGTFINDNIIVNHHIKNQALTPVRRRLRKKGYIVGGVDNPRWQTGDALRGEIHKASYYGAITQFAKDDEGKVLMKEGRPQVNPTIKFVIRRELKYKKSAADSGFASWDDLGKAIVDKELFALMKGQFPAETSFKDACEQGIYMIKKGKNGMPDIKLHHIRHVRCEAPQSGLKIKEQTYKSEKEYKRYFYAAVGDLYAMCCYTNGKIREFRIYSLYDVSCHRKSDIEDIPEFITDKKGNRLMLDYKLRTGDMILLYKDNPAELYDLDNVNLSRRLYKINRFESQSNLVLMTHHLSTSKERGRSLGKTVDYQNLPESIRSSVKSLNFLIMGENRDFVIKNGKIIFNHR

SEQ ID NO: 1152 - protein, 241 aa, Prevotella sp.
QAVKEKIKEAIAGKNFKTAIAEPIFMNKEKGIRINKVRYYVKAQERLKIRQQRDLSSKEYKQFFCVENESNYLLAIYEGELKGKKERDFCVVNNLDSAACLKRSNKGKAAPLVPERSEERNLPLLAVLKRGTQVLFYENSPEEILFDNPQDLVRRLYKVTGINTKKDVKNGKTYLYGNIELRFHQNAQKKDDVKMQSGVYKNNEVLRQGIVLSHKQFKALVEGVDFEFNVLGEIKKKERHA

SEQ ID NO: 1153 - protein, 1216 aa, Prevotella stercorea
MTKILGIDTGTNSLGWAIVDKTADNYNLLDKGVNIFQEGVKIEKGIESSKAAERTEHRATRVRYYRIKLRKIRLLRILSDNHLCPPLSQEELSTWRLKKVYPKNELFMQWQRTDDDTEKTPYAYRHKCIHEKLDLSDVTDRYILGRAFYHIIQRRGFLSNRKEQGGEDSGKVKEGISTLTHEMNEAGYEYLGDYFYALYNKGEKIRKHYTARNEHFLSEFKAICEKQDLEKELGSEVVRNIEKAIFDQRPLKSQKGQVGKCVFEKNKTKCPSSHPMYEEFRMLTFINNIKIKTPNDDVLRPLNTGEREKIMPLFFRKSKKQFDFEDITKKLAPKKMYGFYKKEEDAEMPFLFNYPMDTSVSGCPVTAALKDVFGDDWITAICETYTLGEGKSRFDIVNDIWHALYFYSDKDKLAEFAINRLQLSEDEAKIFSEISLPADYASLSLKAICKILPYLRRGLIYSHAVFLGNLCEVMPKYEWSIKEMRETIIDNIIMEMDKCDTKDKRTFEVCIKDYLKGQYNVSDNSLKKLYHPSMIETYPRVQYTNEHGVYQLGSPRIDSVRNPMAMRSMFRLRKLVNRLLVEGKIDQNTEVHIEFARELNDANKRNAIALFVKENQSANDEARKQIITLFKKETGTDIEPTDKDILKYVLWEEQNHICLYTGKQIRISDFIGANPKFDIEHTIPRSVGGDSTKMNLTLCDSRFNREVKKTKLPVELPNHDEIMERIKEWKKNYELLDIQIRKNKKLSKGATTKEQKDTIIRKRHLLELRRDYWRGKYERFTMESVPEGFSRRQGTDISVISKYARLYLKSLFNRVYTVKGIATSDFRKIWGIQDIYSKKERINHVHHCIDAIVIACIGLDEYNKLGAYYHDEENNKWYGMSKASFKKPWATFVEDIKKIQDEILVYHYTPDNMPKQGRRRIKIDGKKILCKGDAARGSLHNDTYYGAIENDGAVKYVKRIDLASLEEKDVKNIVDDTVRSIIEAAIKEKGFKDAMASTIWMNEEKRVPIKKVRCFTPSITKPLNIRKQRDVSIKEYKQQYHVANDSNYLLALYIGTDNKGKEKREFEIVNILQAAQYYRTSNDKEVVDRHIVPIKSEHDYPFAYTLKIGTMVLLYEKSPNEVWDATIKERNRRLYKVTGLSTMRMKGRNGEYAYATVKLIHNEEARPSKDIKAKNGEYEQGEEFRPAIIMLHTQLNALVQGYDFEINELGEIRRLR

SEQ ID NO: 1154 - protein, 1487 aa, Prevotella timonensis; identical to SEQ ID NO: 130

SEQ ID NO: 1155 - protein, 770 aa, Pseudoramibacter alactolyticus
MAKGYFASDEEIDFSGVDDGFKNTLSSHQKFKEIFDVEVLNDWQKSMSEKIIFWATVYGDSKKFLKERLEDAYGNELDQKQIKRILGLRFKDWGRLSEAFLNLEGKNSKTNQSQTIIEALWNGDGTNNFNLMELLSSQFTYRDTLKKRALKGEKTLTNITYEDLSDLYLSPSVRRMVWQTILIVKELRQVLGAGPAKIFIEMARDVTLKAGTRTTSRRQQLLDLYKNVQTESRNWVEEIETQEESRFRSKKIFLYYTQMGQCMYTGEPIVFKDLFNRNLYDIDHIYPRHFVKDDSLINNLVLVKKQANSHKSDTFPIENSIQQARRDFWKWLSEKGLISREKFNRLTRRTSFSDEELAGFISRQIVETRQGTKAVAQIFENALPDSEVVYVKAGNVSDFRHHFNLLKCREINDLHHAQDAYLNVVVGNVYHTKFTKNPINFIKGYRKDRKAYAYHMDQIFDHPVKRNDIIAWQTDKNQSIATVKKVMAKGTPLVTRMSYEEHGELSNQNICSAKAAQKAEGKGYLPIKNSERLSNTQRYGGYNKYAGSYFFLVEHTLKKNRVRTIETMPLFLRDTIKTSKDLLKYCCESLKLEAPSIRVMKIKMGSLLSVNGAFVYLTGRSGKKLITPNGFQLILPQKWQDYIRLLIKTKDSPDDVEGISGGKNIEFYDILVEKHTKTCLKNRPNPIGEKLREWRNDFIALDNQKQSDILLEILKLTTFDNSGADLRAIGGKNQSGVSTIGKKISSQKSVVLVHRSVTGIFEKQVDLLSI

SEQ ID NO: 1156 - protein, 103 aa, Rhizobium etli
MSGEQLTREIGRSGVKASAVGLGTWAIGGWMWGGTDEAQSIAAIQASLDAGVTLIDTAPAYGLGRSEEIVGKALAGRRDKAVIATKCGLVWHTQKGNHFFDQD

SEQ ID NO: 1157 - protein, 1059 aa, Rhodovulum sp.
MGIRFAFDLGTNSIGWAVWRTGPGVFGEDTAASLDGSGVLIFKDGRNPKDGQSLATMRRVPRQSRKRRDRFVLRRRDLLAALRKAGLFPVDVEEGRRLAATDPYHLRAKALDESLTPHEMGRVIFHLNQRRGFRSNRKADRQDREKGKIAEGSKRLAETLAATNCRTLGEFLWSRHRGTPRTRSPTRIRMEGEGAKALYAFYPTREMVRAEFERLWTAQSRFAPDLLTPERHEEIAGILFRQRDLAPPKIGCCTFEPSERRLPRALPSVEARGIYERLAHLRITTGPVSDRGLTRPERDVLASALLAGKSLTFKAVRKTLKILPHALVNFEEAGEKGLDGALTAKLLSKPDHYGAAWHGLSFAEKDTFVGKLLDEADEERLIRRLVTENRLSEDAARRCASIPLADGYGRLGRTANTEILAALVEETDETGTVVTYAEAVRRAGERTGRNWHHSDERDGVILDRLPYYGEILQRHVVPGSGEPEEKNEAARWGRLANPTVHIGLNQLRKVVNRLIAAHGRPDQIVVELARELKLNREQKERLDRENRKNREENERRTAILAEHGQRDTAENKIRLRLFEEQARANAGIALCPYTGRAIGIAELFTSEVEIDHILPVSLTLDDSLANRVLCRREANREKRRQTPFQAFGATPAWNDIVARAAKLPPNKRWRFDPAALERFEREGGFLGRQLNETKYLSRLAKIYLGKICDPDRVYVTPGTLTGLLRARWGLNSILSDSNFKNRSDHRHHAVDAVVIGVLTRGMIQRIAHDAARAEDQDLDRVFRDVPVPFEDFRDHVRERVSTITVAVKPEHGKGGALHEDTSYGLVPDTDPNAALGNLVVRKPIRSLTAGEVDRVRDRALRARLGALAAPFRDESGRVRDAKGLAQALEAFGAENGIRRVRILKPDASVVTIADRRTGVPYRAVAPGENHHVDIVQMRDGSWRGFAASVFEVNRPGWRPEWEVKKLGGKLVMRLHKGDMVELSDKDGQRRVKVVQQIEISANRVRLSPHNDGGKLQDRHADADDPFRWDLATIPLLKDRGCVAVRVDPIGVVTLRRSNV

SEQ ID NO: 1158 - protein, 1405 aa, Riemerella anatipestifer
MKTILGLDLGTNSIGWALVKEAENSNEKSEIIKLGVRVNPLTVDEKTNFEAGRPLSTNADRTAKRSARRNLQRYKLRRKNLIDLLIKNQLIDKDTPLTEIGKNTTHQTLELRAKAARERIELEDLARVFLAINKKRGYRSSRKVNNEEEGQAVDGMAVAKKLYDENLTPGQYAYELLSKGKKYVPDFYRSDLQAEFNAIWEYQKQFYADILDDELYNALKGQGQQNSRKRFLAIKGVYTAENKGKRDDVKLRHYKWRSEAISKKINIEEVAYVLVEINNDLNKSSGYLGAISDRSKELYFNKETVGENLWKQIQKNPHTSLKNQVFYRQDYLDEFEQIWETQAQFHPQLTLALKEQIRDVIIFYQRKLKSQKGLLSFCQFESWEIERKDENGNVILNKTTQLPKRQTVGRRVAPKSSPLFQEFKIWQNINNLEVTKISEGASKNKKETETLSDDERKLLFEELNLRGNLSQKEVLQILGLKDKEYKTNFSEGLEGNRTNAALFNIYQQIAENEGYGFDWSKKSAQEIKEELKAVFPQIGIQADILDFNANLDGKEFENQASYQLWHLLYSAEEDDKINEEDQIIYGNSAVSLKKKLCEKFGFTPEYAKWIANVSLQDDYGNLSTKAMRKIIPYLIDGNDYSEACALAGYNHSNSLTKEENDNRELLDKLELLPKNSLRNPVVEKILNQMVNVVNQVIETYGKPDEVRIELARELKKSAEKRAEMTKSINEATRRNEDIKKLITKDFGIPNPTKSDVVRYRLWEELAPLAYKDVFTGKQIKKEDLFSSKIDIEHIIPKALLFDDSFSNKTLVFRETNLKKADRTAYDFIESDYNATLDDYIQRVETLYNNTKGTISKGKRNKLLMAQKNLPDGFIERDLRNSQYIAKKAKAMLYQVFKDVNVTSGSITDRLREDWDLINVMKELNFPKYKALGLTEIEERYDIGQEKTKRVEVITDWTKRNDHRHHAMNALTVAFTTSSHIQYLNYLNARKNESHKEHKNIKGIENKITHKQKDKRKFIPPMPNFREEAKKHIETILVSIKNKNKVYTKNINKTKKKSGHNTKEQLTPRGQLHKETVYGKSKRPMSKPTKINKNFSLEQAQLIINVQEKELVLRHLAQFDNNPAVAFDTKTLKKMPLLKNGEPLKEVLCFEEIFTIRKDITPDLKIEKVVDEKIKAILEQRKKDFGGNAKEAFSDLDKNPIWLNKKKGICIKRVTITGVSNAEALHHQKDHLGREILDDNGNPIPADFVSTGNNHHLAVYLDSEGKLQDNIVSFYEAVVRTSQGLPVVDKGLNKDLGWKFLFSLKQNEMFVFPNDDFDINDFDLLDDKKAELISKHLYRVQKISKVSAGNSFVRDIVFRHHLETTVKEVKELKDISYIQLKSLEGLRNIKKVRINHIGKIVQVGEY

SEQ ID NO: 1159 - protein, 1145 aa, Riemerella anatipestifer
MKTILGLDLGTNSIGWALVKETENSNEKSEIIKLGVRVNPLTVDEKTNFEAGRPLSTNADRTAKRSARRNLQRYKLRRKNLIDLLIKHRLIDKDTPLTEIGKNTTHQTLELRAKAARERIELEDLARVFLAINKKRGYRSSRKVNNEEEGQVVDGMAVAKKLYDENLTPGQYAYELLSKGKKYVPDFYRSDLQAEFDSIWEYQKQFYADILDDELYNALKGQGQQNSRKRFLAIKGVYTAENKGKRDEVKLQHYKWRSEAITQKLSIEEVAYVLVEINNDLNKSSGYLGAISDRSKELYFNKETVGENLWKQIQKNPHTSLKNQVFYRQDYLDEFEQIWETQAQFHPQLTLALKEQIRDVVIFYQRKLKSQKGLLSFCQFESWEIERKDENGNVILNKTTQLPKRQTVGRRVAPKSSPLFQEFKIWQNINNLEIAKISDGNSKNKKETEALSDDERKLLFEELNLRGNLSQKEVLQILGLKDKEYKTNFPEGLEGNRTNAALFNIYQQIAENEGYGDWTKKSAQEIKEELKAVFPQIGIQADILDFNAELDGKEFENQASYQLWHLLYSAEEDDKINEEDQIIYGNSAVSLKKKLCEKFGFTPEYAKWIANVSLQDDYGNLSTKAMRKIIPYLIDGNDYSEACALAGYNHSNSLTKEENDNRERLNKLELLPKNSLRNPVVEKILNQMVNVVNQVIETYGKPDEVRIELARELKKSAEERAEMTKGINEATRRNEDIKKLITKNFGIPNPTKNDVVRYRLWEELAPLAYKDVFTGRQIKKEDLFSSKIDIEHIIPKALLFDDSFSNKTLAFRETNLKKADRTAYGFIESDYNATLDDYIQRVETLYNNAKGTISKGKRNKLLMAQKNLPDGFIERDLRNSQYIAKKAKSMIEKVFNDVNVTSGSITDRLREDWDLINVMKELNFPKYKALGLTEIEERYDIGQEKTKKVEVITDWTKRNDHRHHAMDALTVAFTTKSHVQYLNNLNTIHSLKGDEVDLELSKLYGLKNTITEVVNKKRKFIPPMPNFREEAKKHIETILVSIKNKNKVYTKNINKTKKESGYHTKEQLTPRGQLHKETVYGKSKRPMNKPTKINKNFSLEQAQLIINVQEKELVLRHLAQFDNNPAVAFDTKTLKKCHYLKMVNL

SEQ ID NO: 1160 - protein, 1400 aa, Riemerella anatipestifer
MKTILGLDLGTNSIGWALVKETENSNEKSEIIKLGVRVNPLTVDEKTNFEAGRPLSTNADRTAKRSARRNLQRYKLRRKNLIDLLIKHRLIDKDTPLTEIGKNTTHQTLELRAKAARERIELEDLARVFLAINKKRGYRSSRKVNNEEEGQVVDGMAVAKKLYDENLTPGQYAYELLSKGKKYVPDFYRSDLQAEFDSIWEYQKQFYADILDDELYNALKGQGQQNSRKRFLAIKGVYTAENKGKRDEVKLQHYKWRSEAITQKLSIEEVAYVLVEINNDLNKSSGYLGAISDRSKELYFNKETVGENLWKQIQKNPHTSLKNQVFYRQDYLDEFEQIWETQAQFHPQLTLALKEQIRDVVIFYQRKLKSQKGLLSFCQFESWEIERKDENGNVILNKTTQLPKRQTVGRRVAPKSSPLFQEFKIWQNINNLEIAKISDGNSKNKKETEALSDDERKLLFEELNLRGNLSQKEVLQILGLKDKEYKTNFPEGLEGNRTNAALFNIYQQIAENEGYGDWTKKSAQEIKEELKAVFPQIGIQADILDFNAELDGKEFENQASYQLWHLLYSAEEDDKINEEDQIIYGNSAVSLKKKLCEKFGFTPEYAKWIANVSLQDDYGNLSTKAMRKIIPYLIDGNDYSEACALAGYNHSNSLTKEENDNRERLNKLELLPKNSLRNPVVEKILNQMVNVVNQVIETYGKPDEVRIELARELKKSAEERAEMTKGINEATRRNEDIKKLITKNFGIPNPTKNDVVRYRLWEELAPLAYKDVFTGRQIKKEDLFSSKIDIEHIIPKALLFDDSFSNKTLAFRETNLKKADRTAYGFIESDYNATLDDYIQRVETLYNNAKGTISKGKRNKLLMAQKNLPDGFIERDLRNSQYIAKKAKSMIEKVFNDVNVTSGSITDRLREDWDLINVMKELNFPKYKALGLTEIEERYDIGQEKTKKVEVITDWTKRNDHRHHAMDALTVAFTTKSHVQYLNNLNTIHSLKGDEVDLELSKLYGLKNTITEVVNKKRKFIPPMPNFREEAKKHIETILVSIKNKNKVYTKNINKTKKESGYHTKEQLTPRGQLHKETVYGKSKRPMNKPTKINKNFSLEQAQLIINVQEKELVLRHLAQFDNNPAVAFDTKTLKKMPLLKNGEPLKEVLCFEEIFTIRKDITPDLKIEKVVDEKIKAILEQRKKDFGGNAKEAFSDLDKNPIWLNKEKGICIKRVTITGVSNAEALHHQKDHLGREILDDNGNPIPADFVSTGNNHHVAIYEDEKGKLQEKVVSLYEAVARANQGLPVVDKGLNEDLGWKFLFTMKQNEMFVFPNDDFDVNDIDLLDENNAKIISQHLFRVQKLATKNYMFRHHLETNVQEVKELNDIAYKSIRSTEPLKNIKKVRINHIGKIVQVGEY

SEQ ID NO: 1161 - protein, 1128 aa, Roseburia intestinalis
MDEKMDYRIGLDIGIASVGWAVLQNNSDDEPVRIVDLGVRIFDTAEIPKTGESLAGPRRAARTTRRRLRRRKHRLDRIKWLFENQGLINIDDFLKRYNMAGLPDVYQLRYEALDRKLTDEELAQVLLHIAKHRGFRSTRKAETAAKENGAVLKATDENQKRMQEKGYRTVGEMIYLDEAFRIGCSWSEKGYILTPRNKAENYQHTMLRAMLVEEVKEIFSSQRRLGNKKATEELEEKYLEIMTSQRSFDLGPGMQPDGKPSPYAMEGFSDRVGKCTFLGDQGELRGAKGTYTAEYFVALQKINHTKLVNQDGETRNFTEEERRALTLLLFTQKEVKYAAVRKKLGLPEDILFYNLNYKKAATKEEQQKENQNTEKAKFIGMPYYHDYKKCLEERVKYLTENEVRDLFDEIGMILTCYKNDDSRTERLAKLGLVPIEMEGLLAYTPTKFQHLSMKAMRNIIPFLEKGMTYDKACEEAGYDFKADSKGTKQKLLTGENVNQTINEITNPVVKRSVSQTVKVINAIIRTYGSPQAINIELAREMSKTFEERRKIKGDMEKRQKNNEDVKKQIQELGKLSPTGQDILKYRLWQEQQGICMYSGKTIPLEELFKPGYDIDHILPYSITFDDSFRNKVLVTSQENRQKGNRTPYEYMGNDEQRWNEFETRVKTTIRDYKKQQKLLKKHFSEEERSEFKERNLTDTKYITTVIYNMIRQNLEMAPLNRPEKKKQVRAVNGAITAYLRKRWGLPQKNRETDTHHAMDAVVIACCTDGMIQKISRYTKVRERCYSKGTEFVDAETGEIFRPEDYSRAEWDEIFGVHIPKPWETFRAELDVRMGDDPKGFLDTHSDVALELDYPEYIYENLRPIFVSRMPNHKVTGAAHADTIRSPRHFKDEGIVLTKTALTDLKLDKDGEIDGYYNPQSDLLLYEALKKQLLLYGNDAKKAFAQDFHKPKADGTEGPVVRKVKIQKKQTMGVFVDSGNGIAENGGMVRIDVFRVNGKYYFVPVYTADVVKKVLPNRASTANKPYSEWRTMEDKDFLFSLYSRDLVHIKSKKGIPIKNVDGSLGESKEVYAYYIGADISGAKIEGKAHDSRYTFRGIGVQKLELIEKCQVDILGHISTVKNEKRMGFS

SEQ ID NO: 1162 - protein, 1471 aa, Scardovia wiggsiae
MGYKAPRNDKGEIDYGVGLDLGNGSVGWVAMDKDYHLIRARGHELIGARLFDPANSAENRRESRTTRRRLSRRRWRLRMLDSLFASELAKIDPNFLARRKYSWVHPKDEQNHENWYGSIIFGSKEQDKQFYKDYPTIYHLRKKLTEDTERHDIREIYVAIHHIVKYRGHFLREGEINSENLFDPEGFVELIKDVIKLNNSYDESTPIFEASPADVSEALLNEHTSRSGRIEDTLDKLDFSVSRVDKHELKGMRDAAKAVIGAIVGNTADFSKIFNLDNLDKDSKDNLKLKFADSNFDEKYGGVVGSGLLDETQIELVDRIHAVYDAVALKGILGDAHTISEAKVESYEKHRKNWKLIKEELRTKENKDEVDLWYGDLSGRQYKNPPDPEKGPDEGSKKDSPIRDSDQKQNLIKKANDYFTELIDDSQLSEEQKNCLKNDINNGQLFPVQRSSDNGVIPYQIHLNELRRIIENQKQYYPFLAETFIRKTAEGKSYEENKIVALLKFRVPYYVGPLVSKEDMEEHSSGNSAYHWMARNPGRGEAITPWNFDEVVDKDESGARFISRLTGTDTYLLGEPTLPQHSLLYEEYMVLSELNNVRLNVRQGNHWSDKNRQRLSYKQKEFLIENLFKEHKTVTRKRAEDCLSSMGCGEVQLFGLSDEKKFASSLSSYITLKKILGKAFVDDSGNSAILERIIEVQTVFEDREPLTHQLSLIDSLTVEQRKQLAKIHYTGWGKLSRKLLTSKKGSYKIHSQNEIMRTQHSIIDIMRGDSLNLIEIIRDKKIGIGEWIDNENLDRETGESDVSRLESVFEGIVMSPRVKRGVVQAVRVIDDLAKAIGNPPQRIFIEMADEVQASQRTVSRLSRLKALYGSPSLQKEFNDLKDLRKSLNETKDADLQEDRLYLYYIQLGKDLYTGKEISIDSLSSAYDIDHIVPQALTQDDSIDNRVLVSRKENARKTDSYLYTPDLIKNMRPLWGKLLAAGLMSQKKYDALTRVDDFKDREKQRFVQRSLVETRQIMKNVSTILRTYYGEDTNVVTLKSSITHDMRKYLGFPYKNRDINDYHHAQDALCISAAGQFMLNRHFVSGGEVTDGASNAYNMYLAEYLQEFRDAKARGERKRSTAFGFVVGSMSSKDDEKRTDHRTGEIVWSETNAEYLRKVMNYKKMLITQKVGDVKTRALYDETRYGHKESSAKSIKFDNLRRDTSLYGGFSGASTAYMMLVEYKKKNKLVSITAQEASLLAVADQKNDTVSVMDGILASHGLSGAKILLPKIVTGQLLDYSDALVTLQSASELNTARQMWLPRNDYNDIDIILKSKDIEDAAHKLGYDSDTVHVLRRIQKLFEAVFRVAESQFPLHQLSKDQQEEILRDPQNYGFGSAVKLLGGLLKALHANAENTNLAGLVKVLHGDKEYSDDGKAKEFKKFGFSPRWRRISNPTGFTLSDSDTFIYQSPSGIFEQRVTVKELKEKADKQK

SEQ ID NO: 1163 - protein, 116 aa, Sphingobacterium spiritivorum
MFRKYFEEKNSARLLFTLKQGDFVYVPDDNEEVILDESSPLFIDYWKNISERSNNIHVVQKFSGKEIYFLKHTIADTIAKKIEFGSQDCYQSLNGKSIKEFCIKIDSDRLGNISKV

SEQ ID NO: 1164 - protein, 1306 aa, Sphingobacterium spiritivorum; identical to SEQ ID NO: 93

SEQ ID NO: 1165 - protein, 1110 aa, Sphingobium sp.
MAEGKKRIWRLGADLGANSLGWAAIELSAPVNGKPIAILAAGSRIFSDGRDPKSGASLAVDRRDARAMRRRRDRFKQRQKALIKYLIADGLFPADEAARNAMAAIDPYAVRARALDEALSLPELGRALFHLNQRRGFKSNRKADRKADDDAGKIAIGIDRTRDAIAEDEADAGAEPGSWTFGKWLHERRLKGQSVRTRLRPESGEDAKGDGYDFYPDRALMEEEFDAIWAAQAPHHPDVLTNDVHDRLHEIIFYQRPLKAPQVGMCSLIPGDRRLPKAHPLFQRRRLLEELNALMIVRPGEVAQRLTREERDILLLKLKDKNKVSFATLRKALKLDPDARFNKESEDRTDLKGDEVAAVMGSKTRFGNLWVHLSIEAQWDVLARLDAVESDAEDAAFCAWLVETYALTPEQARAVANAPLPPGYGRFGETATRKLIEALRDGKKDDRVLVYSEAVTEAGLGHHSDRRTGEVFEDAKGRPQLPYYGVALERHIMPGTGDPSDPEEMRVGRLTNPTVHIGLNQLRRILNVLIRAYGPPAEIAIELARELKLTDEDKKRINRENNDNRIAAERRSEKLLAIGQADSGANRALLKLWEELNPANVLDRRCIYSGRQISIDMLFSAAVEVDHILPFAATLDDSNGNKIVCLREANREKRKRSPHDAWGHSARWDEIAARAAQLPRNKRWRFEPDAMDKFRDEGGFQARHLVDTQYLARLSREYLATLYPEKGEGSGHIWVSPGRLTEMVRRKLGLNDLLPDHNFGGGADQAKNRLDHRHHAIDAVVVAIVDRGMLNAIARASGQEGAEGRERIIIPEPWDGFRDALRETVNRITVSHRTDHGTASKAGLPKGKDATAGRLHNDTAYGFTGDTDAKGNSIVVRRVPLSSFKKLADLDRIRDADLKAALYQHLNGLEGKAFEKALAEFHKLEWHNFGGVRRVRVTEPLTVIPIKDRNGRIYKGYKGDSNYRYDVWELPDGKWVTNWKNEAGEAMSSVISMFDAHQSSEPPRPHPAARKILSLHQNDLLAIEREGEDRKLMRVVKFGQSGQITLAEHQQAGDLKKRDAVSNDDDPFKYFAPTSGGLKKVKARQVRIDEIGRVLDPGFPARTARRKTRG

SEQ ID NO: 1166 - protein, 1084 aa, SporoLactobacillus vineae
MKYSIGLDIGISSVGWSVINLDRERIELMGARLFDAAENPKNGSSLAAPRRDARSARRRLRRRRYRVGRVRHFIIDRGLVTRGQADQLFDWKDGDLDIWLVRVNALERLLTDREFARVLIHIAKNRGYRSNRKSEAKSGENGQVLSAIKANKELMEEKGYQTVAEMLVNEPETFAGRKRNRGGEYTHVIARSELEHEIRLIFTKQRAFGNRFATEENENTYVKIWAAQRPVATKDDILKKIGDCTFEKGEKRAPKASYAFQYFRALDKLNRLRILSVREPSRNLTDDERNLIVPALFNHDKQKYSDLRKILQLRDDQKFNELFYDPGKSLKENENKTFLSLAEQYKIRKVIRDVQGKDGLLQYRPLDIDTIAYALTVFKDDQDTRDYLSNTFVNGNGKQVLNLANRAFDAELIDGLLSLSFAKFGHLSLKALHKLIPHMEQGLSYYDACKKVGYHDNEQVGKSKQHLLPVIPADEIRNPVVVRSLSQTRKVINAIIKRYGSPTFMYIELAREMGRPYNERRDLEKQYNKNRTVNDSAIEQIHELYPEIGAPRGHDILKYKLWQQQDCKCAYSLEKIPAEKIFEPGYAEVDHIIPYSRSFDDSNSNKVLVLSRMNQEKKNRTPYEWFGGDEHRWNKFESYVNALKVNRKKKSLLTKKNMDTEEEDTFKSRHLNDTRYITRFIKSFVEDNLLFREIEGAKQHVFTVNGAYTSLMRKRWGFNKNREESDLHHSVDAVIIAVSQPFRNEVSRYFKHREISLPQLLKRTWDYFPEPWEGFVKELRARTLQDPEKLKLALESLDLDSYDPEFIDEVKPIFISRMPKRSIKGQIHDETLRRNRGKTKDGFVKIVTRTRLENIKFDKNGDFPMYGRESDPKTYQAIKQRYLENNKDKKKAFIEPLYKPAKNPNNASLIRSVKIEDKANQIVPLRDEAVAYNASIVRTEVYRNKETGKFYLAPVYVSDVFAGREPRRFIRANVPYEQWVNITDKFTFLFNLYPNDVIYIKMKKVKTTKSNINKTISWQESYFYFKGTDIHTGAITIIDHMNSFTDRVGTQGLQLFEKYQVDPLGNLSRVHGETQYGVPALSHS

SEQ ID NO: 1167 - protein, 475 aa, Staphylococcus massiliensis
MGQDYILGLDIGITSVGYGLIDYHDKSVIDAGVRLFKEANVENNEGRRSKRGSRRLQRRRKHRLARTRNLLESYQLNPFPKCEKNPYEIRVKGFKEVLTSDELSAALLHLAKRRGIDNVHVTDTESDSSDNGLSTKEQLAKNQKALESRYVCELQLERLLNDNKVRGANNRFKTQDFVREAKQILSIQKDHHNLDQVFIDKYISLLETRREYYEGPGKGSPYGWDGDIKKWYELLMGRCTYFPESLRSVKYAYSADLFNALNDLNNLVIVRDENDKLTYPEKYHIVENVFKQRKKPTLKQIAKEIDVAPEDIRGYRVTASGTPVFTSFKLYHDIKSVTSNDKVLEDTELLDAIAEVLTIYQSPIEVQEKLESLNVILTKEEIEGISKLTGYTGTHALSLKAIQIVIDELWETNDNQMTIFTRLNMKPQKVDLAKANKIPTSLVEDFIISPVAKRAFIQSIKVINAVIKNMVCLKI

SEQ ID NO: 1168 - protein, 581 aa, Staphylococcus massiliensis
MPKDIIIELAREKNSDEERKIIRDVQKRNQQTRDLVDKVIKETGKTKAKGMVEKLILHDKQEGKCLYSLKSIPLEDLLNNPHHYEVDHIIPRSVSYDNSMNNKVLVLQEENSKKSNQTPFQYFNSSNTHITFKQFKQHVLNLSKTKDRITKKKKEYLLEERDINKFSVQKEFINRNLVDTRYATRELMTLLRAYFSANELDVKVKAINGGFTSYLRKRWDFKKDRNAGYKHHAEDALIIANVDFIFKQLKALDNAKKVMEGRKVQVEKDNVEDNEHYESLFREPDQIKEIKLYDNYKFSHRVDKKPNRELINDTIYSTRKVDNKTYTIQTVNNIYDKQNDQLKKLFNKSPEKFLMYKHDPKTFDKLATIMRQYKNEKNPLYKFHDETGEYLTKYAKKDNGPIVKSLKYIGKQVNAHLDITNDYENSNNKVVKLSLKPFRFDVYLDDGKYKFVTVKYLDIIKKDTYYVIDEEKYKLALQQKKISENAKFIGSFYNNDLIKINGELLRVIGVNDDAKNTLELNMIDISYRDYVENMNLATTPRIRKNIGKSITILEKYTTDILGNTFKISSPEKPQFIFKVRD

SEQ ID NO: 1169 - protein, 1334 aa, Staphylococcus pseudintermedius; identical to SEQ ID NO: 200

SEQ ID NO: 1170 - protein, 1112 aa, Staphylococcus simulans; identical to SEQ ID NO: 247

SEQ ID NO: 1171 - protein, 773 aa, Streptococcus agalactiae
MNKPYSIGLDIGTNSVGWSIITDDYKVPAKKMRVLGNTDKEYIKKNLIGALLFDGGNTAADRRLKRTARRRYTRRRNRILYLQEIFAEEMSKVDDSFFHRLEDSFLVEEDKRGSKYPIFATLQEEKDYHEKFSTIYHLRKELADKKEKADLRLIYIALAHIIKFRGHFLIEDDSFDVRNTDISKQYQDFLEIFNTTFENNDLLSQNVDVEAILTDKISKSAKKDRILAQYPNQKSTGIFAEFLKLIVGNQADFKKYFNLEDKTPLQFAKDSYDEDLENLLGQIGDEFADLFSAAKKLYDSVLLSGILTVIDLSTKAPLSASMIQRYDEHREDLKQLKQFVKASLPEKYQEIFADSSKDGYAGYIEGKTNQEAFYKYLSKLLTKQEDSENFLEKIKNEDFLRKQRTFDNGSIPHQVHLTELKAIIRRQSEYYPFLKENQDRIEKILTFRIPYYIGPLAREKSDFAWMTRKTDDSIRPWNFEDLVDKEKSAEAFIHRMTNNDFYLPEEKVLPKHSLIYEKFTVYNELTKVRYKNEQGETYFFDSNIKQEIFDGVFKEHRKVSKKKLLDFLAKEYEEFRIVDVIGLDKENKAFNASLGTYHDLEKILDKDFLDNPDNESILEDIVQTLTLFEDREMIKKRLENYKDLFTESQLKKLYRRHYTGWGRLSAKLINGIRDKESQKTILDYLIDDGRSNRNFMQLINDDGLSFKSIISKAQAGSHSDNLKEVVGELAGSPAIKKGILQSLKIVDELVKVMGYEPEQIVVEMARENQTTNQ

SEQ ID NO: 1172 - protein, 1370 aa, Streptococcus agalactiae
MNKPYSIGLDIGTNSVGWSIITDDYKVPAKKMRVLGNTDKEYIKKNLIGALLFDGGNTAADRRLKRTARRRYTRRRNRILYLQEIFAEEMSKVDDSFFHRLEDSFLVEEDKRGSKYPIFATMQEEKDYHEKFPTIYHLRKELADKKEKADLRLVYLALAHIIKFRGHFLIEDDRFDVRNTDIQKQYQAFLEIFDTSFENNHLLSQNVDVEAILTDKISKSAKKDRILAQYPNQKSTGIFAEFLKLIVGNQADFKKHFNLEDKTPLQFAKDSYDEDLENLLGQIGDEFADLFSAAKKLYDSVLLSGILTVTDLSTKAPLSASMIQRYDEHREDLKQLKQFVKASLPEKYQEIFADSSKDGYAGYIEGKTNQEAFYKYLSKLLTKQEDSEYFLEKIKNEDFLRKQRTFDNGSIPHQVHLTELKAIIRRQSEYYPFLKENQDKIEKILTFRIPYYVGPLARGNSDFAWMTRKTDDSIRPWNFEDLVDKEKSAEAFIHRMTNNDLYLPEEKVLPKHSLIYEKFTVYNELTKVRYKNEQGETYFFDSNVKQEIFDGVFKEHRKVSKKQLLDFLAKEFEEFRIVDVTGLDKENKAFNASLGTYHDLKKILDKDFLDNPDNESILEDIVQTITLFEDREMIKKRLENYKDLFTESQLKKLYRRHYTGWGRLSAKLINGIRDRESQKTILDYLISDGRANRNFMQLINDDGLSFKSIISKAQSGSHSDNLKEVVGELAGSPAIKKGILQSLKIVDELVKVMGYEPEQIVVEMARENQTTNQGRRNSRQRYKLLEDGVKNLASDLNGDILKEYPTDNQALQNERLFLYYLQNGRDMYTGEALDIDNLSQYDIDHIVPQAFIKDDSIDNRVLVSSAKNRGKSDDVPSIDIVKARKAFWKKLLDAKLISQRKYDNLTKAERGGLTPDDKAGFIQRQLVETRQITKHVARILDERFNNKVDDNNKPIRKVKIVTLKSNLVSNFRKEFGFYKIREVNNYHHAHDAYLNAVVAKAILTKYPQLEPEFVYGDYPKYNSYKTRKSATEKLFFYSNIMNFFKTKVTLADETVVVKDDIEVNNETGEIAWDKKKHFATVRKVLSYPQVNIVKKTEVQTGGFSKESILAHSNSDKLIPRKTKDIYLDPKKYGGFDSPIVAYSVLVLADIKKGKAQKLKTVKELIGITIMERERFEKNPSAFLESKGYLNIRTDKLIILPKYSLFELENGRRRLLASAGELQKGNELALPTQYMKFLYLASRYNESKGKPEEIEKKQEFVNQHVSYFDDILQLINDFSKRVILADANLEKINKLYSDNKDNTPVDELAKNIINLFTFTSLGAPAAFKFFDKSVDRKRYTSTKEVLDSTLIHQSITGLYETRIDLGKLGED

SEQ ID NO: 1173 - protein, 1370 aa, Streptococcus agalactiae
MNKPYSIGLDIGTNSVGWSIITDDYKVPAKKMRVLGNTDKEYIKKNLIGALLFDGGNTAADRRLKRTARRRYTRRRNRILYLQEIFAEEMSKVDDSFFHRLEDSFLVEEDKRGSKYPIFATMQEEKDYHEKFPTIYHLRKELADKKEKADLRLVYLALAHIIKFRGHFLIEDDRFDVRNTDIQKQYQAFLEIFDTSFENNHLLSQNVDVEAILTDKISKSAKKDRILAQYPNQKSTGIFAEFLKLIVGNQADFKKHFNLEDKTPLQFAKDSYDEDLENLLGQIGDEFADLFSAAKKLYDSVLLSGILTVTDLSTKAPLSAYMIQRYDEHREDLKQLKQFVKASLPEKYQEIFADSSKDGYAGYIEGKTNQEAFYKYLSKLLTKQEDSEYFLEKIKNEDFLRKQRTFDNGSIPHQVHLTELKAIIRRQSEYYPFLKENQDKIEKILTFRIPYYVGPLARGNSDFAWMTRKTDDSIRPWNFEDLVDKEKSAEAFIHRMTNNDLYLPEEKVLPKHSLIYEKFTVYNELTKVRYKNEQGETYFFDSNVKQEIFDGVFKEHRKVSKKQLLDFLAKEFEEFRIVDVTGLDKENKAFNASLGTYHDLKKILDKDFLDNPDNESILEDIVQTITLFEDREMIKKRLENYKDLFTESQLKKLYRRHYTGWGRLSAKLINGIRDRESQKTILDYLISDGRANRNFMQLINDDGLSFKSIISKAQSGSHSDNLKEVVGELAGSPAIKKGILQSLKIVDELVKVMGYEPEQIVVEMARENQTTNQGRRNSRQRYKLLEDGVKNLASDLNGDILKEYPTDNQALQNERLFLYYLQNGRDMYTGEALDIDNLSQYDIDHIVPQAFIKDDSIDNRVLVSSAKNRGKSDDVPSIDIVKARKAFWKKLLDAKLISQRKYDNLTKAERGGLTPDDKAGFIQRQLVETRQITKHVARILDERFNNKVDDNNKPIRKVKIVTLKSNLVSNFRKEFGFYKIREVNNYHHAHDAYLNAVVAKAILTKYPQLEPEFVYGDYPKYNSYKTRKSATEKLFFYSNIMNFFKTKVTLADETVVVKDDIEVNNETGEIAWDKKKHFATVRKVLSYPQVNIVKKTEVQTGGFSKESILAHSNSDKLIPRKTKDIYLDPKKYGGFDSPIVAYSVLVLADIKKGKAQKLKTVKELIGITIMERERFEKNPSAFLESKGYLNIRTDKLIILPKYSLFELENGRRRLLASAGELQKGNELALPTQYMKFLYLASRYNESKGKPEEIEKKQEFVNQHISYFDDILQLINDFSKRVILADANLEKINKLYSDNKDNTPVDELAKNIINLFTFTSLGAPAAFKFFDKSVDRKRYTSTKEVLDSTLIHQSITGLYETRIDLGKLGED

SEQ ID NO: 1174 - protein, 1378 aa, Streptococcus agalactiae
MNKPYSIGLDIGTNSVGWSIITDDYKVPAKKMRVLGNTDKEYIKKNLIGALLFDGGNTAADRRLKRTARRRYTRRRNRILYLQEIFAEEMSKVDDSFFHRLEDSFLVEEDKRGSKYPIFATMQEEKYYHEKFPTIYHLRKELADKKEKADLRLIYLALAHIIKFRGHFLIEDDRFDVRNTDIQKQYQAFLEIFDTTFENNDLLSQNVDVEAILTDKISKSAKKDRILARYPNQKSTGIFAEFLKLIVGNQADFKKHFNLEDKTPLQFAKDSYDEDLENLLGQIGDEFADLFSAAKKLYDSVLLSGILTVIDLSTKAPLSASMIQRYDEHHEDLKHLKQFVKASLPENYREVFADSSKDGYAGYIEGKTSQEAFYKYLLKLLTKQEGSEYLLEKIKNEDFLRKQRTFDNGSIPHQVHLTELRAIIRRQSEYYPFLKENLDRIEKILTFRIPYYVGPLAREKSDFAWMTRKTDDSIRPWNFEDLVDKEKSAEAFIHRMTNNDLYLPEEKVLPKHSLIYEKFTVYNELTKVRFLAEGFKDFQFLNRKQKETIFNSLFKEKRKVTEKDIISFLNKVDGYEGIAIKGIEKQFNASLSTYHDLKKILGKDFLDNTDNELILEDIIQTLTLFEDREMIKKRLDIYKDFFTESQLKKLYRRHYTGWGRLSAKLINGIRNKENQKTILDYLIDDGSANRNFMQLIKDAGLSFKPIIDKARTGSHSDNLKEVVGELAGSPAIKKGILQSLKIVDELVKVMGYEPEQIVVEMARENQTTAKGLSRSRQRLTTLRESLGNLKSNILEEKKPKYVKDQVENHHLSDDRLFLYYLQNGKDMYTDDELDIDNLSQYDIDHIIPQAFIKDDSIDNRVLVSSAKNRGKSDDVPSIEIVKARKMFWKNLLDAKLMSQRKYDNLTKAERGGLTSDDKARFIQRQLVETRQITKHVARILDERFNNELDSKGRRIRKVKIVTLKSNLVSNFRKEFGFYKIREVNNYHHAHDAYLNAVVAKAILTKYPQLEPEFVYGLYRRKKLSKIVREDKEEKYSEATRKMFFYSNLMNMFKRVVRLADGSIVVRPVIETGRYMGKTAWDKKKHFATVRKVLSYPQNNIVKKTEIQTGGFSKESILAHGNSDKLIPRKTKDIYLDPKKYGGFDSPIVAYSVLVVADIKKGKAQKLKTVTELLGITIMERSRFEKNTSAFLESKGYLNIRDDKLMILPKYSLFELENGRRRLLASAGELQKGNELALPTQFMKFLYLASRYNESKGKPEEIEKKQEFVNQHVSYFDDILQLINDFSNRVILADANLEKINKLYQDNKENIPVDELANNIINLFTFTSLGAPAAFKFFDKIVDRKRYTSTKEVLNSTLIHQSITGLYETRIDLGKLGEG

SEQ ID NO: 1175 - protein, 1370 aa, Streptococcus agalactiae
MNKPYSIGLDIGTNSVGWSIITDDYKVPAKKMRVLGNTDKEYIKKNLIGALLFDGGNTAADRRLKRTARRRYTRRRNRILYLQEIFAEEMSKVDDSFFHRLEDSFLVEEDKRGSKYPIFATMQEEKYYHEKFPTIYHLRKELADKKEKADLRLIYLALAHIIKFRGHFLIEDDRFDVRNTDIQKQYQAFLEIFDTTFENNDLLSQNVDVEAILTDKISKSAKKDRILARYPNQKSTGIFAEFLKLIVGNQADFKKHFNLEDKTPLQFAKDSYDEDLENLLGQIGDEFADLFSAAKKLYDSVLLSGILTVTDLSTKAPLSASMIQRYDEHREDLKQLKQFVKASLPEKYQEIFADSSKDGYAGYIEGKTNQEAFYKYLSKLLTKQEGSEYLLEKIKNEDFLRKQRTFDNGSIPHQVHLTELRAIIRRQSEYYPFLKENLDRIEKILTFRIPYYVGPLAREKSDFAWMTRKTDDSIRPWNFEDLVDKEKSAEAFIHRMTNNDLYLPEEKVLPKHSLIYEKFTVYNELTKVRFLAEGFKDFQFLNRKQKETIFNSLFKEKRKVTEKDIISFLNKVDGYEGIAIKGIEKQFNASLSTYHDLKKILGKDFLDNTDNELILEDIVQTLTLFEDREMIRKRLDIYKDFFTESQLKKLYRRHYTGWGRLSAKLINGIRNKENQKTILDYLIDDGSANRNFMQLIKDAGLSFKPIIDKARTGSHSDNLKEVVGELAGSPAIKKGILQSLKIVDELVKVMGYEPEQIVVEMARENQTTAKGLSRLRQRLTTLRESLANLKSNILEEKKPKYVKDQVENHHLSDDRLFLYYLQNGKDMYTDDELDIDNLSQYDIDHIIPQAFIKDDSIDNRVLVSSAKNRGKSDDVPSVEIVKDCKVFWKKLLDAKLMSQRKYDNLTKAERGGLTSDDKARFIQRQLVETRQITKHVARILDERFNNELDSKGRRIRKVKIVTLKSNLVSNFRKEFGFYKIREVNNYHHAHDAYLNAVVAKAILTKYPQLEPEFVYGDYPKYNSYKTRKSATEKLFFYSNIMNFFKTKVTLADGTVVVKDDIEVNNDTGEIVWDKKKHFATVRKVLSYPQVNIVKKTEIQTGGFSKESILAHGNSDKLIPRKTKDIYLDPKKYGGFDSPIVAYSVLVVADIKKGKAQKLKTVTELLGITIMERSRFEKNPSAFLESKGYLNIRDDKLMILPKYSLFELENGRRRLLASADELQKGNELALPTQFMKFLYLASRYNELKGKPEEIEQKQEFVVQHVSYFDDILQIINDFSNRVILADANLEKINKLYQDNKENIPVDELANNIINLFTFTSLGAPAAFKFFDKIVDRKRYTSTKEVLNSTLIHQSITGLYETRIDLGKLGED

SEQ ID NO: 1176 - protein, 1377 aa, Streptococcus agalactiae
MNKPYSIGLDIGTNSVGWSIITDDYKVPAKKMRVLGNTDKEYIKKNLIGALLFDGGNTAADRRLKRTARRRYTRRRNRILYLQEIFAEEMSKVDDSFFHRLEDSFLVEEDKRGSKYPIFATMQEEKYYHEKFPTIYHLRKELADKKEKADLRLVYLALAHIIKFRGHFLIEDDRFDVRNTDIQKQYQAFLEIFDTTFENNHLLSQNVDVEAILTDKISKSAKKDRILAQYPNQKSTGIFAEFLKLIVGNQADFKKHFNLEDKTPLQFAKDSYDEDLENLLGQIGDEFADLFSVAKKLYDSVLLSGILTVTDLSTKAPLSASMIQRYDEHHEDLKHLKQFVKASLPENYREVFADSSKDGYAGYIEGKTNQEAFYKYLLKLLTKQEGSEYFLEKIKNEDFLRKQRTFDNGSIPHQVHLTELRAIIRRQSEYYPFLKENQDRIEKILTFRIPYYVGPLAREKSDFAWMTRKTDDSIRPWNFEDLVDKEKSAEAFIHRMTNNDLYLPEEKVLPKHSLIYEKFTVYNELTKVRFLAEGFKDFQFLNRKQKETIFNSLFKEKRKVTEKDIISFLNKVDGYEGIAIKGIEKQFNASLSTYHDLKKILGKDFLDNTDNELILEDIVQTLTLFEDREMIKKCLDIYKDFFTESQLKKLYRRHYTGWGRLSAKLINGIRNKENQKTILDYLIDDGSANRNFMQLINDDDLSFKPIIDKARTGSHSDNLKEVVGELAGSPAIKKGILQSLKIVDELVKVMGYEPEQIVVEMARENQTTAKGLSRSRQRLTTLRESLANLKSNILEEKKPKYVKDQVENHHLSDDRLFLYYLQNGRDMYTKKALDIDNLSQYDIDHIIPQAFIKDDSIDNRVLVSSAKNRGKSDDVPSIEIVKARKMFWKNLLDAKLMSQRKYDNLTKAERGGLTSDDKARFIQRQLVETRQITKHVARILDERFNNEVDNGKKICKVKIVTLKSNLVSNFRKEFGFYKIREVNDYHHAHDAYLNAVVAKAILTKYPQLEPEFVYGMYRQKKLSKIVHEDKEEKYSEATRKMFFYSNLMNMFKRVVRLADGSIVVRPVIETGRYMGKTAWDKKKHFATVRKVLSYPQNNIVKKTEIQTGGFSKESILAHGNSDKLIPRKTKDIYLDPKKYGGFDSPIVAYSVLVVADIKKGKAQKLKTVTELLGITIMERSRFEKNPSAFLESKGYLNIRDDKLMILPKYSLFELENGRRRLLASAGELQKGNELALPTQFMKFLYLASRYNESKGKPEEIEKKQEFVNQHVSYFDDILQLINDFSKRVILADANLEKINKLYQDNKENIPVDELANNIINLFTFTSLGAPAAFKFFDKIVDRKRYTSTKEVLNSTLIHQSITGLYETRIDLGKLGED

SEQ ID NO: 1177 - protein, 1370 aa, Streptococcus agalactiae
  MOD_RES (117)..(117): Any naturally occurring amino acid
MNKPYSIGLDIGTNSVGWSIITDDYKVPAKKMRVLGNTDKEYIKKNLIGALLFDGGNTAADRRLKRTARRRYTRRRNRILYLQEIFAEEMSKVDDSFFHRLEDSFLVEEDKRGSKYXIFATLQEEKDYHEKFSTIYHLRKELADKKEKADLRLIYIALAHIIKFRGHFLIEDDSFDVRNTDISKQYQDFLEIFNTTFENNDLLSQNVDVEAILTDKISKSAKKDRILAQYPNQKSTGIFAEFLKLIVGNQADFKKYFNLEDKTPLQFAKDSYDEDLENLLGQIGDEFADLFSAAKKLYDSVLLSGILTVIDLSTKAPLSASMIQRYDEHREDLKQLKQFVKASLPEKYQEIFADSSKDGYAGYIEGKTNQEAFYKYLSKLLTKQEDSENFLEKIKNEDFLRKQRTFDNGSIPHQVHLTELKAIIRRQSEYYPFLKENQDRIEKILTFRIPYYIGPLAREKSDFAWMTRKTDDSIRPWNFEDLVDKEKSAEAFIHRMTNNDFYLPEEKVLPKHSLIYEKFTVYNELTKVRYKNEQGETYFFDSNIKQEIFDGVFKEHRKVSKKKLLDFLAKEYEEFRIVDVIGLDKENKAFNASLGTYHDLEKILDKDFLDNPDNESILEDIVQTLTLFEDREMIKKRLENYKDLFTESQLKKLYRRHYTGWGRLSAKLINGIRDKESQKTILDYLIDDGRSNRNFMQLINDDGLSFKSIISKAQAGSHSDNLKEVVGELAGSPAIKKGILQSLKIVDELVKVMGYEPEQIVVEMARENQTTNQGRRNSRQRYKLLDDGVKNLASDLNGNILKEYPTDNQALQNERLFLYYLQNGRDMYTGEALDIDNLSQYDIDHIIPQAFIKDDSIDNRVLVSSAKNRGKSDDVPSLEIVKDCKVFWKKLLDAKLMSQRKYDNLTKAERGGLTSDDKARFIQRQLVETRQITKHVARILDERFNNELDSKGRRIRKVKIVTLKSNLVSNFRKEFGFYKIREVNNYHHAHDAYLNAVVAKAILTKYPQLEPEFVYGDYPKYNSYKTRKSATEKLFFYSNIMNFFKTKVTLADGTVVVKDDIEVNNDTGEIVWDKKKHFATVRKVLSYPQNNIVKKTEIQTGGFSKESILAHGNSDKLIPRKTKDIYLDPKKYGGFDSPIVAYSVLVVADIKKGKAQKLKTVTELLGITIMERSRFEKNPSAFLESKGYLNIRADKLIILPKYSLFELENGRRRLLASAGELQKGNELALPTQFMKFLYLASRYNESKGKPEEIEKKQEFVNQHVSYFDDILQLINDFSKRVILADANLEKINKLYQDNKENISVDELANNIINLFTFTSLGAPAAFKFFDKIVDRKRYTSTKEVLNSTLIHQSITGLYETRIDLGKLGED

SEQ ID NO: 1178 - protein, 1370 aa, Streptococcus agalactiae
MNKPYSIGLDIGTNSVGYSVVTDDYKVPAKKMRVLGNTDKEYIKKNLIGALLFDGGNTASDRRLKRTARRRYTRRRNRILYLQEIFAEEMSKVDDSFFHRLEDSFLVEDDKRGSKYPIFATMQEEKDYHEKFPTIYHLRKELADKKEKADLRLVYLALAHIIKFRGHFLIEDDSFDVRNTDIQRQYQAFLEIFDTTFENNHLLSQNIDVEGILTDKISKSAKKDRILAQYPNQKSTGIFAEFLKLIVGNQADFKKHFNLEDKTPLQFAKDSYDEDLENLLGQIGDEFADLFSVAKKLYDSVLLSGILTVTDLSTKAPLSASMIQRYDEHREDLKQLKQFVKASLPEKYQEIFTDSSKDGYAGYIEGKTNQGAFYKYLSKLLTKQEGSEYFLEKIKNEDFLRKQRTFDNGSIPHQVHLTELKAIIRRQSEYYPFLKENLDRIEKILTFRIPYYVGPLAREKSDFAWMTRKTDDSIRPWNFEELVDKEASAEAFIHRMTNNDLYLPEEKVLPKHSLIYEKFTVYNELTKVRYKNEQGETYFFDSNIKQEIFDGVFKEHRKVSKKKLLDFLAKEYEEFRIVDVIGLDKENKAFNASLGTYHDLKKILDKDFLDNPDNESILEDIVQTLTLFEDREMIKKRLENYKDLFTESQLKKLYRRHYTGWGRLSAKLINGIRDKESQKTILDYLISDGRANRNFMQLIHDDGLSFKPIIDKAQAGSHSDNLKEVVGELAGSPAIKKGILQSLKIVDELVKVMGYEPEQVVVEMARENQTTNQGRRNTRQRYKLLEEGVKNLASDLNGNILKEYPTDNQALQNERLFLYYLQNGRDMYTGEALDIDNLSQYDIDHIVPQAFIKDDSIDNRVLVSSAKNRGKSDNVPSIDIVKARKAFWKKLLDAKLMSQRKYDNLTKAERGGLTSDDKARFIQRQLVETRQITKHVARILDERFNNELDSKGRRIRKVKIVTLKSNLVSNFRKEFGFYKIREVNDYHHAHDAYLNAVVAKAILTKYPQLEPEFVYGDYPKYNSYKTRKSATEKLFFYSNIMNFFKTKVTLADGTVVVKDDIEVNNDTGEIVWDKKKHFATVRKVLSYPQVNIVKKTEIQTGGFSKESILAHGNSDKLIPRKTKDIYLDPKKYGGFDSPIVAYSVLVVADIKKGKAQKLKTVTELLGITIMERFRFEKNPSAFLESKGYLNIRDDKLMILPKYSLFELENGRRRLLASAGELQKGNELALPTQYMKFLYLASRYNELKGKPEEIEQKQEFVVQHVSYFDDILQIINDFSNRVILADANLEKINKLYQDNKENISVDELANNIINLFTFTSLGAPAAFKFFDKIVDRKRYTSTKEVLNSTLIHQSITGLYETRIDLGKLGED

SEQ ID NO: 1179 - protein, 1370 aa, Streptococcus agalactiae
MNKPYSIGLDIGTNSVGYSVVTDDYKVPAKKMRVLGNTDKEYIKKNLIGALLFDGGNTASDRRLKRTARRRYTRRRNRILYLQEIFAEEMSKVDDSFFHRLEDSFLVEDDKRGSKYPIFATMQEEKDYHEKFPTIYHLRKELADKKEKANLRLVYLALAHIIKFRGHFLIEDDSFDVRNTDIQRQYQAFLEIFDTTFENNHLLSQNIDVEGILTDKISKSAKKDRILAQYPNQKSTGIFAEFLKLIVGNQADFKKHFNLEDKTPLQFAKDSYDEDLENLLGQIGDEFADLFSVAKKLYDSVLLSGILTVTDLSTKAPLSASMIQRYDEHREDLKQLKQFVKASLPEKYQEIFTDSSKDGYAGYIEGKTNQGAFYKYLSKLLTKQEGSEYFLEKIKNEDFLRKQRTFDNGSIPHQVHLTELKAIIRRQSEYYPFLKENLDRIEKILTFRIPYYVGPLAREKSDFAWMTRKTDDSIRPWNFEELVDKEASAEAFIHRMTNNDLYLPEEKVLPKHSLIYEKFTVYNELTKVRYKNEQGETYFFDSNIKQEIFDGVFKEHRKVSKKKLLDFLAKEYEEFRIVDVIGLDKENKAFNASLGTYHDLKKILDKDFLDNPDNESILEDIVQTLTLFEDREMIKKRLENYKDLFTESQLKKLYRRHYTGWGRLSAKLINGIRDKESQKTILDYLISDGRANRNFMQLIHDDGLSFKPIIDKAQAGSHSDNLKEVVGELAGSPAIKKGILQSLKIVDELVKVMGYEPEQVVVEMARENQTTNQGRRNTRQRYKLLEEGVKNLASDLNGNILKEYPTDNQALQNERLFLYYLQNGRDMYTGEALDIDNLSQYDIDHIVPQAFIKDDSIDNRVLVSSAKNRGKSDNVPSIDIVKARKAFWKKLLDAKLMSQRKYDNLTKAERGGLTSDDKARFIQRQLVETRQITKHVARILDERFNNELDSKGRRIRKVKIVTLKSNLVSNFRKEFGFYKIREVNDYHHAHDAYLNAVVAKAILTKYPQLEPEFVYGDYPKYNSYKTRKSATEKLFFYSNIMNFFKTKVTLADGTVVVKDDIEVNNDTGEIVWDKKKHFATVRKVLSYPQVNIVKKTEIQTGGFSKESILAHGNSDKLIPRKTKDIYLDPKKYGGFDSPIVAYSVLVVADIKKGKAQKLKTVTELLGITIMERFRFEKNPSAFLESKGYLNIRDDKLMILPKYSLFELENGRRRLLASAGELQKGNELALPTQYMKFLYLASRYNELKGKPEEIEQKQEFVVQHVSYFDDILQIINDFSNRVILADANLEKINKLYQDNKENISVDELANNIINLFTFTSLGAPAAFKFFDKIVDRKRYTSTKEVLNSTLIHQSITGLYETRIDLGKLGED

SEQ ID NO: 1180 - protein, 1370 aa, Streptococcus agalactiae
  MOD_RES (9)..(9): Any naturally occurring amino acid
MNKPYSIGXDIGTNSVGWSIITDDYKVPAKKMRVLGNTDKEYIKKNLIGALLFDGGNTAADRRLKRTARRRYTRRRNRILYLQEIFAEEMSKVDDSFFHRLEDSFLVEEDKRGSKYPIFATLQEEKDYHEKFSTIYHLRKELADKKEKADLRLIYIALAHIIKFRGHFLIEDDSFDVRNTDISKQYQDFLEIFNTTFENNDLLSQNVDVEAILTDKISKSAKKDRILAQYPNQKSTGIFAEFLKLIVGNQADFKKYFNLEDKTPLQFAKDSYDEDLENLLGQIGDEFADLFSAAKKLYDSVLLSGILTVIDLSTKAPLSASMIQRYDEHREDLKQLKQFVKASLPEKYQEIFADSSKDGYAGYIEGKTNQEAFYKYLSKLLTKQEDSENFLEKIKNEDFLRKQRTFDNGSIPHQVHLTELKAIIRRQSEYYPFLKENQDRIEKILTFRIPYYIGPLAREKSDFAWMTRKTDDSIRPWNFEDLVDKEKSAEAFIHRMTNNDFYLPEEKVLPKHSLIYEKFTVYNELTKVRYKNEQGETYFFDSNIKQEIFDGVFKEHRKVSKKKLLDFLAKEYEEFRIVDVIGLDKENKAFNASLGTYHDLEKILDKDFLDNPDNESILEDIVQTLTLFEDREMIKKRLENYKDLFTESQLKKLYRRHYTGWGRLSAKLINGIRDKESQKTILDYLIDDGRSNRNFMQLINDDGLSFKSIISKAQAGSHSDNLKEVVGELAGSPAIKKGILQSLKIVDELVKVMGYEPEQIVVEMARENQTTNQGRRNSRQRYKLLDDGVKNLASDLNGNILKEYPTDNQALQNERLFLYYLQNGRDMYTGEALDIDNLSQYDIDHIIPQAFIKDDSIDNRVLVSSAKNRGKSDDVPSLEIVKDCKVFWKKLLDAKLMSQRKYDNLTKAERGGLTSDDKARFIQRQLVETRQITKHVARILDERFNNELDSKGRRIRKVKIVTLKSNLVSNFRKEFGFYKIREVNNYHHAHDAYLNAVVAKAILTKYPQLEPEFVYGDYPKYNSYKTRKSATEKLFFYSNIMNFFKTKVTLADGTVVVKDDIEVNNDTGEIVWDKKKHFATVRKVLSYPQNNIVKKTEIQTGGFSKESILAHGNSDKLIPRKTKDIYLDPKKYGGFDSPIVAYSVLVVADIKKGKAQKLKTVTELLGITIMERSRFEKNPSAFLESKGYLNIRADKLIILPKYSLFELENGRRRLLASAGELQKGNELALPTQFMKFLYLASRYNESKGKPEEIEKKQEFVNQHVSYFDDILQLINDFSKRVILADANLEKINKLYQDNKENISVDELANNIINLFTFTSLGAPAAFKFFDKIVDRKRYTSTKEVLNSTLIHQSITGLYETRIDLGKLGED

SEQ ID NO: 1181 - protein, 1125 aa, Streptococcus anginosus
MNGLVLGLDIGIASVGVGILNKETGEIIHANSRIFPAATADSNVERRGFRQGRRLGRRKKHRSARLNNLFEEFGFITDFSAIPLNLNPYALRVKGLSEELTNEELFIALKNIIKRRGISYLDDASEDGETASNEYGKAVEENRKLLADKTPGQIQLERFEKYGQVRGDFTVVENGENHRLINVFSTSAYKKEAERILRRQQEFNVRISDEFIEAYLTILTGKRKYYHGPGNEKSRTDYGRFRTDGTTLDNIFGILIGKCTFYPDEYRAAKASYTAQEFNLLNDLNNLTVPTETKKLSPEQKRQIVEYARTAKTLGTPTLLKYIAKLVDGSIDDIKGYRIDKSDKPEMHTFDAYRKMRTLDLVNIDALSRETLDDLAHILTLNTESEGILEALNSKMPSTFTKEQIDELIQFRKKNSAVFGKGWHNFSLKLMNELISELYETSEEQMTILTRLGKQRSREISKRTKYIDEKELTEEIYNPVVAKSVRQAIKIINEATKRYGIFDNIVIEMARENNEEDAKKDYIKRQKANQDEKNASMEKAAFQYNGKKELPDSIFHGHKELATKIRLWHQQGERCLYTGKNISIRDLIHNPHQYEIDHILPLSLSFDDGLANKVLVLATANQEKGQRTPFQAIDSMDDAWSYREFKQYVRNSKSLSNKKKDYLLTEEDISKIEVKQKFIERNLVDTRYSSRVVLNTLQEFYKTNDFDTKISVVRGQFTSQLRRKWKIEKSRDTYHHHAVDALIIAASSQLRLWKKQNNPLISYKEGQFVDPETGEILSLTDDEYKELVFRPPYDYFVDTLKSKSFEDSILFSYQVDSKYNRKISDATIYGTRKAQLGKDKQEETYVLGKIKDIYSQKGYEDFIKRYNKDETQFLIYHKDPQTFEKVIEEILKTYPDKELNEKGKEIPCNPFEKYRQENGPIRKYSKKGKGPEIKSLKYYDNKLGNHIDITPVNSQNQVVLQSLKPWRTDVYFNPRTSKYELMGLKYSDLRFEKGSGSYGISPEKYNKVKAKEGVNEDSEFKFTLYKNDLILIKDTETGEQQLFRYGSRNDTSKHYVELKPYEKAKFEGNQQLMNLLGTVAKGGQCLKGINKPNLSIYKVKTDVLGNKYFIKKEGDQPQLNFKKKF

SEQ ID NO: 1182 - protein, 1386 aa, Streptococcus anginosus
MNQKYSIGLDIGTNSVGWAVITDDYKVPAKKMKVLGNTDKQSIKKNLLGALLFDSGETAEATRLKRTARRRYTRRRNRLRYLQEIFAEEMMQVDESFFQRLDDSFLVDEDKRGERHPIFGNIAAEVKYHDEFPTIYHLRKHLADISQKADLRLVYLALAHMIKFRGHFLIEGQLKAENTNVQALFKDFVEVYDKTVEESHLSEITVDALSILTEKVSKSRRLENLIAHYPAEKKNTLFGNLIALFLGLQPNFKTNFQLSEDAKLQFSKDTYEEDLEGLLGEVGDEYADLFASAKNLYDAILLSGILTVDDNSTKAPLSASMVKRYEEHQKDLKKFEDFIKVNALDQYNAIFKDKNKKGYAGYIESGVKQDEFYKYLKGILLQINGSGDFLDKIDREDFLRKQRTFDNGSIPHQIHLQEMHAILRRQGEHYPFLKENQDKIEKILTFRIPYYVGPLARKGSRFAWAEYKADEKITPWNFDDILDKEKSAEKFITRMTLNDLYLPEEKVLPKHSLLYETFTVYNELTKVKYVNEQGEAKFFDANMKQEIFDHVFKENRKVTKDKLLNYLNKEFEEFRIVNLTGLDKENKVFNSSLGTYHDLRKILNKSFLDNKENAQIIEDIIQTLTLFEDREMIRQRLQKYSDIFTKAQLKKLERRHYTGWGRLSYKLINGIRNKENKKTILDYLIDDGYANRNFMQLINDDALSFKEEIAKAQIIGDVDDIANVVHDLPGSPAIKKGILQSVKIVDELVKVMGHNPANIIIEMARENQTTDRGRRNSQQRLKLLQDSLKNLDNPVNIKNVENQQLQNDRLFLYYIQNGKDMYTGETLDINNLSQYDIDHIIPQAYIKDDSFDNRVLTSSSENRGKSDNVPSIEVVCARKADWMRLRKAGLISQRKFDNLTKAERGGLTENDKAGFIKRQLVETRQITKHVAQVLDARFNAKHDENKKVIRDVKIITLKSNLVSQFRKDFKFYKVREINDYHHAHDAYLNAVIGTALLKKYPKLASEFVYGEFKKYDVRKFIAKSDKEIGKATAKYFFYSNLMNFFKKEVKFADGTVVERPDIETSEDGEIAWNKQTDFKIVRKVLSYPQVNIVKKTEVQTHGLDRGKPRGLFNANPSPKPKPDSSENLVGVKRNLDPKKYGGYAGISNSYAVLVKAIIEKGVKKKETMVLEFQGISILDRITFEKDKRAFLLGKGYKDIKKIIELPKYSLFELKDGSRRMLASILSTNNKRGEIHKGNELFVPQKFTTLLYHAKRINNPINKDHIEYVKKHRDDFKELLNYVLEFNEKYVGATKNGERLKEAVADFDSKSNEEICTSFLGAVNSKNAGLFELTSLGSASDFEFLGVKIPRYRDYTPSSLLKDSTLIHQSITGLYETRIDLSKLGED

SEQ ID NO: 1183 - protein, 1396 aa, Streptococcus anginosus
MTKPYSIGLDIGTNSVGWAVITDDYKVPAKKMKVLGNTNRDYIKKNLLGALLFDGGETAEGRRLKRTARRRYTRRKNRLRYLQEIFAEEMMQVDESFFQRLDDSFLVEEDKQGSKYPIFGTLKEEKEYHKKFKTIYHLREELANSKEKADLRLVYLALAHMIKFRGHFLYEGDLKAENTDVQALFKDFVEEYDKTIEESHLSEITVDALSILTEKVSKSSRLENLIAHYPTEKKNTLFGNLIALSLGLQANFKTNFQLSEDAKLQFSKDTYEEDLEGLLGEVGDEYADLFVSAKNLYDAILLSGILTVDDNSTKAPLSASMVKRYKEHKEELAAFKRFIKEKLPKKYEEIFKDDTKNGYAGYVGADKKLRKRSGKLATEEEFYKYVKGILNKVEGADYFLDKIDREDFLRKQRTFDNGSIPHQIHLQEMHAILRRQGEHYPFLKENQDKIEKILTFRIPYYVGPLARKGSRFAWAEYKADEKITPWNFDDILDKEKSAEKFITRMTLNDLYLPEEKVLPKHSPLYETFTVYNELTKVKYVNEQGEAKFFDTNMKQEIFDHVFKENRKVTKDKLLNYLNKEFEEFRIVNLTGLDKENKAFNASLGTYHDLRKILDKSFLDDKVNEKIIEDIIQTLTLFEDREMIRQRLQKYSDIFTTQQLKELERRHYTGWGRLSYKLINGIRNKENKKTILDYLIDDGYANRNFMQLINDDALSFKEEIARAQIIGDVDDIANVVHDLPGSPAIKKGILQSVKIVDELVKVMGHNPTNIIIEMARENQTTDKGRRNSQQRLKLLQDSLKNLDNPVNIKNVENQQLQNDRLFLYYIQNGKDMYTGETLDINNLSQYDIDHIIPQAFIKDNSLDNRVLTRSDKNRGKSDDVPSIEVVHEMKSFWSKLLSVKLITQRKFDNLTKAERGGLTENDKAGFIKRQLVETRQITKHVAQVLDARFNAKHDENKKVIRDVKIITLKSNLVSQFRKDFKFYKVREINDYHHAHDAYLNAVIGTALLKKYPKLASEFVYGEFKKYDVRKFIAKSDKEIGKATAKYFFYSNLMNFFKKEVKFADGTVVERPDIETSEDGEIAWNKQTDFKIVRKVLSYPQVNIVKKTEVQTHGLDRGKPRGLFNANPSPKPKPDSSENLVGIKRNLDPKKYGGYAGISNSYAVLVKAIIEKGVKKKETMVLEFQGISILDRITFEKDKRAFLLGKGYKDIKKIIELPKYSLFELKDGSRRMLASILSTNNKRGEIHKGNELFVPQKFTTLLYHAKRINNPINKDHIEYVKKHRDDFKELLNYVLEFNEKYVGATKNGERLKEAVADFDSKSNEEICTSFLGAVNSKNAGLFELTSLGSASDFEFLGVKIPRYRDYTPSSLLKDSILIHQSITGLYETRIDLSKLGED

SEQ ID NO: 1184 - protein, 1375 aa, Streptococcus canis
MEKKYSIGLDIGTNSVGWAVITDDYKVPSKKFKVLGNTNRKSIKKNLMGALLFDSGETAEATRLKRTARRRYTRRKNRIRYLQEIFANEMAKLDDSFFQRLEESFLVEEDKKNERHPIFGNLADEVAYHRNYPTIYHLRKKLADSPEKADLRLIYLALAHIIKFRGHFLIEGKLNAENSDVAKLFYQLIQTYNQLFEESPLDEIEVDAKGILSARLSKSKRLEKLIAVFPNEKKNGLFGNIIALALGLTPNFKSNFDLTEDAKLQLSKDTYDDDLDELLGQIGDQYADLFSAAKNLSDAILLSDILRSNSEVTKAPLSASMVKRYDEHHQDLALLKTLVRQQFPEKYAEIFKDDTKNGYAGYVGIGIKHRKRTTKLATQEEFYKFIKPILEKMDGAEELLAKLNRDDLLRKQRTFDNGSIPHQIHLKELHAILRRQEEFYPFLKENREKIEKILTFRIPYYVGPLARGNSRFAWLTRKSEEAITPWNFEEVVDKGASAQSFIERMTNFDEQLPNKKVLPKHSLLYEYFTVYNELTKVKYVTERMRKPEFLSGEQKKAIVDLLFKTNRKVTVKQLKEDYFKKIECFDSVEIIGVEDRFNASLGTYHDLLKIIKDKDFLDNEENEDILEDIVLTLTLFEDREMIEERLKTYAHLFDDKVMKQLKRRHYTGWGRLSRKMINGIRDKQSGKTILDFLKSDGFSNRNFMQLIHDDSLTFKEEIEKAQVSGQGDSLHEQIADLAGSPAIKKGILQTVKIVDELVKVMGHKPENIVIEMARENQTTTKGLQQSRERKKRIEEGIKELESQILKENPVENTQLQNEKLYLYYLQNGRDMYVDQELDINRLSDYDVDHIVPQSFIKDDSIDNKVLTRSVENRGKSDNVPSEEVVKKMKNYWRQLLNAKLITQRKFDNLTKAERGGLSEADKAGFIKRQLVETRQITKHVARILDSRMNTKRDKNDKPIREVKVITLKSKLVSDFRKDFQLYKVRDINNYHHAHDAYLNAVVGTALIKKYPKLESEFVYGDYKVYDVRKMIAKSEQEIGKATAKRFFYSNIMNFFKTEVKLANGEIRKRPLIETNGETGEVVWNKEKDFATVRKVLAMPQVNIVKKTEVQTGGFSKESILSKRESAKLIPRKKGWDTRKYGGFGSPTVAYSILVVAKVEKGKAKKLKSVKVLVGITIMEKGSYEKDPIGFLEAKGYKDIKKELIFKLPKYSLFELENGRRRMLASATELQKANELVLPQHLVRLLYYTQNISATTGSNNLGYIEQHREEFKEIFEKIIDFSEKYILKNKVNSNLKSSFDEQFAVSDSILLSNSFVSLLKYTSFGASGGFTFLDLDVKQGRLRYQTVTEVLDATLIYQSITGLYETRTDLSQLGGD

SEQ ID NO: 1185 - protein, 1345 aa, Streptococcus constellatus
MGKPYSIGLDIGTNSVGWAVVTDDYKVPAKKMKVLGNTDKQSIKKNLLGALLFDSGETAEATRLKRTARRRYTRRKNRLRYLQEIFTGEMNKVDENFFQRLDDSFLVDEDKRGEHHPIFGNIAAEVKYHDDFPTIYHLRRHLADTSKKADLRLVYLALAHMIKFRGHFLYEGDLKAENTDVQALFKDFVEEYDKTIEESHLSEITVDALSILTEKVSKSSRLENLIAHYPTEKKNTLFGNLIALSLDLHPNFKTNFQLSEDAKLQFSKDTYEEDLEGFLGEVGDEYADLFASAKNLYDAILLSGILTVDDNSTKAPLSASMVKRYEEHQKDLKKLKDFIKVNAPDQYNAIFKDKNKKGYASYIESGVKQDEFYKYLKGILLKINGSGDFLDKIDREDFLRKQRTFDNGSIPHQIHLQEMHAILRRQGEHYPFLKENQDKIEKILTFRIPYYVGPLARKGSRFAWAEYKADEKITPWNFDDILDKEKSAEKFITRMTLNDLYLPEEKVLPKHSPLYEAFTVYNELTKVKYVNEQGEAKFFDTNMKQEIFDHVFKENRKVTKDKLLNYLNKEFEEFRIVNLTGLDKENKAFNSSLGTYHDLRKILDKSFLDDKANEKTIEDIIQTLTLFEDREMIRQRLQKYSDIFTKAQLKKLERRHYTGWGRLSYKLINGIRNKENKKTILDYLIDDGYANRNFMQLINDDALSFKEEIARAQIIDDVDDIANVVHDLPGSPAIKKGILQSVKIVDELVKVMGHNPANIIIEMARENQTTDKGRRNSQQRLKLLQDSLKNLDNPVNIKNVENQQLQNDRLFLYYIQNGKDMYTGETLDINNLSQYDIDHIIPQAFIKDNSLDNRVLTRSDKNRGKSDDVPSIEVVHEMKSFWSKLLSVKLITQRKFDNLTKAERGGLTEEDKAGFIKRQLVETRQITKHVAQILDERFNTEFDGNKRRIRNVKIITLKSNLVSNFRKEFELYKVREINDYHHAHDAYLNAVVGNALLLKYPQLEPEFVYGEYPKYNSYRSRKSATEKFLFYSNILRFFKKEDIQTNEDGEIAWNKEKHIKILRKVLSYPQVNIVKKTEEQTGGFSKESILPKGESDKLIPRKTKNSYWDPKKYGGFDSPVVAYSILVFADVEKGKSKKLRKVQDMVGITIMEKKRFEKNPVDFLEQRGYRNVRLEKIIKLPKYSLFELENKRRRLLASAKELQKGNELVIPQRFTTLLYHSYRIEKDYEPEHREYVEKHKDEFKELLEYISVFSRKYVLADNNLTKIEMLFSKNKDAEVSSLAKSFISLLTFTAFGAPAAFNFFGENIDRKRYTSVTECLNATLIHQSITGLYETRIDLSKLGED

SEQ ID NO: 1186 - protein, 538 aa, Streptococcus dysgalactiae
DYDVDHIVPQSFIKDDSIDNKVLTRSDKNRGKSDNVPSEEVVKKMKNYWRQLLNAKLITQRKFDNLTKAERGGLSELDKAGFIKRQLVETRQITKHVAQILDSRMNTKYDENDKLIREVKVITLKSKLVSDFRKDFQFYKVREINNYHHAHDAYLNAVVGTALIKKYPKLESEFVYGDYKVYDVRKMIAKSEQEIGKATAKRFFYSNIMNFFKTEITLANGEIRKRPLIETNEETGEIVWDKGRDFATVRKVLSMPQVNIVKKTEVQTGALTNESIYARGSFDKLISRKHRFESSKYGGFGSPTVTYSVLVVAKSKVQDGKVKKIKTGKELIGITLLDKLVFEKNPLKFIEDKGYGNVQIDKCIRLPKYSLFEFENGTRRMLASVMANNNSRGDLQKANEMFLPAKLVTLLYHAHKIESSKELEHEAYILDHYNDLYQLLSYIERFASLYVDVEKNISKVKELFSNIESYSISEICSSVINLLTLTASGAPADFKFLGTTIPRKRYGSPQSILSSTLIHQSITGLYETRIDLSQLGGD

SEQ ID NO: 1187 - protein, 1155 aa, Streptococcus dysgalactiae
MDKKYSIGLDIGTNSVGWAVITDDYKVPSKKFKVLGNTDRHSIKKNLIGALLFDSGETAEATRLKRSARRRYTRRKNRIRYLQEIFSSEMSKVDDSFFHRLEESFLVEEDKKHERHPIFGNIVDEVAYHEKYPTIYHLRKKLADSTDKADLRLIYLALAHMIKFRGHFLIEGDLNPDNSDMDKLFIQLVQTYNQLFEENPINASRVDAKAILSARLSKSRRLENLIAQLPGEKRNGLFGNLIALSLGLTPNFKSNFDLAEDAKLQLSKDTYDDDLDNLLAQIGDQYADLFLAAKNLSDAILLSDILRVNSEITKAPLSASMIKRYDEHHQDLTLLKALVRQQLPEKYKEIFFDQSKNGYAGYIDGGASQEEFYKFIKPILEKMDGTEELLAKLNREDLLRKQRTFDNGSIPHQIHLGELHAILRRQEDFYPFLKDNREKIEKILTFRIPYYVGPLARGNSRFAWMTRKSEETITPWNFEEVVDKGASAQSFIERMTNFDKNLPNEKVLPKHSLLYEYFTVYNELTKVKYVTEGMRKPEFLSGKQKEAIVDLLFKTNRKVTVKQLKEDYFKKIECFDSVEISGVEDRFNASLGTYHDLLKIIKDKDFLDNEENEDILEDIVLTLTLFEDKEMIEERLKTYAHLFDDKVMKQLKRRHYTGWGRLSRKLINGIRDKQSGKTILDFLKSDGFANRNFIQLIHDDSLTFKEAIQKAQVSGQGHSLHEQIANLAGSPAIKKGILQSVKVVDELVKVMGHKPENIVIEMARENQTTQKGQKNSRERMKRIEEGIKELGSQILKEHPVENTQLQNEKLYLYYLQNRRDMYVDQELDINRLSDYDVDHIVPQSFIKDDSIDNKVLTRSDKNRGKSDDVPSEEVVKKMKNYWRQLLNAKLITQRKFDNLTKAERGGLSELDKAGFIKRQLVETRQITKHVAQILDSRMNTKYDENDKLIREVKVITLKSKLVSDFRKDFQFYKVREINNYHHAHDAYLNAVVGTALIKKYPKLESEFVYGDYKVYDVRKMIAKSEQEIGKATAKRFFYSNIMNFFKTEITLANGEIRKRPLIETNEETGEIVWDKGRDFATVRKVLSMPQVNIVKKTEVQTGALTNESIYARGSFDKLISRKHRFESSKYGGFGSPTVTYSVLVVAKYQSYKMEK

SEQ ID NO: 1188 - protein, 1371 aa, Streptococcus dysgalactiae
MDKKYSIGLDIGTNSVGWAVITDDYKVPSKKFKVLGNTDRHSIKKNLIGALLFDSGETAEATRLKRTARRRYTRRKNRIRYLQEIFSSEMSKVDDSFFHRLEESFLVEEDKKHERHPIFGNIVDEVAYHEKYPTIYHLRKKLADSTDKADLRLIYLALAHMIKFRGHFLIEGDLNPDNSDMDKLFIQLVQTYNQLFEENPINASRVDAKAILSARLSKSRRLENLIAQLPGEKRNGLFGNLIALSLGLTPNFKSNFDLAEDAKLQLSKDTYDDDLDNLLAQIGDQYADLFLAAKNLSDAILLSDILRVNSEITKAPLSASMIKRYDEHHQDLTLLKALVRQQLPEKYKEIFFDQSKNGYAGYIDGGASQEEFYKFIKPILEKMDGTEELLAKLNREDLLRKQRTFDNGSIPHQIHLGELHAILRRQEDFYPFLKDNREKIEKILTFRIPYYVGPLARGNSRFAWMTRKSEETITPWNFEEVVDKGASAQSFIERMTNFDKNLPNEKVLPKHSLLYEYFTVYNELTKVKYVTEGMRKPEFLSGKQKEAIVDLLFKTNRKVTVKQLKEDYFKKIECFDSVEISGVEDRFNASLGTYHDLLKIIKDKDFLDNEENEDILEDIVLTLTLFEDKEMIEERLKTYAHLFDDKVMKQLKRRHYTGWGRLSRKLINGIRDKQSGKTILDFLKSDGFANRNFIQLIHDDSLTFKEAIQKAQVSGQGHSLHEQIANLAGSPAIKKGILQSVKVVDELVKVMGHKPENIVIEMARENQTTQKGQKNSRERMKRIEEGIKELGSQILKEHPVENTQLQNEKLYLYYLQNGRDMYVDQELDINRLSDYDVDHIVPQSFIKDDSIDNKVLTRSDKNRGKSDDVPSEEVVKKMKNYWRQLLNAKLITQRKFDNLTKAERGGLSELDKAGFIKRQLVETRQITKHVAQILDSRMNTKYDENDKLIREVKVITLKSKLVSDFRKDFQFYKVREINNYHHAHDAYLNAVVGTALIKKYPKLESEFVYGDYKVYDVRKMIAKSEQEIGKATAKRFFYSNIMNFFKTEITLANGEIRKRPLIETNEETGEIVWNKGRDFATVRKVLSMPQVNIVKKTEVQTGALTNESIYARGSFDKLISRKHRFESSKYGGFGSPTVTYSVLVVAKSKVQDGKVKKIKTGKELIGITLLDKLVFEKNPLKFIEDKGYGNVQIDKCIKLPKYSLFEFENGTRRMLASVMANNNSRGDLQKANEMFLPAKLVTLLYHAHKIESSKELEHEAYILDHYNDLYQLLSYIERFASLYVDVEKNISKVKELFSNIESYSISEICSSVINLLTLTASGAPADFKFLGTTIPRKRYGSPQSILSSTLIHQSITGLYETRIDLSQLGGD

SEQ ID NO: 1189 - protein, 1371 aa, Streptococcus dysgalactiae
MDKKYSIGLDIGTNSVGWAVITDDYKVPSKKFKVLGNTDRHSIKKNLIGALLFDSGETAEATRLKRTARRRYTRRKNRIRYLQEIFSSEMSKVDDSFFHRLEESFLVEEDKKHERHPIFGNIVDEVAYHEKYPTIYHLRKKLADSTDKADLRLIYLALAHMIKFRGHFLIEGDLNPDNSDMDKLFIQLVQTYNQLFEENPINASRVDAKAILSARLSKSRRLENLIAQLPGEKRNGLFGNLIALSLGLTPNFKSNFDLAEDAKLQLSKDTYDDDLDNLLAQIGDQYADLFLAAKNLSDAILLSDILRVNSEITKAPLSASMIKRYDEHHQDLTLLKALVRQQLPEKYKEIFFDQSKNGYAGYIDGGASQEEFYKFIKPILEKMDGTEELLAKLNREDLLRKQRTFDNGSIPHQIHLGELHAILRRQEDFYPFLKDNREKIEKILTFRIPYYVGPLARGNSRFAWMTRKSEETITPWNFEEVVDKGASAQSFIERMTNFDKNLPNEKVLPKHSLLYEYFTVYNELTKVKYVTEGMRKPEFLSGKQKEAIVDLLFKTNRKVTVKQLKEDYFKKIECFDSVEISGVEDRFNASLGTYHDLLKIIKDKDFLDNEENEDILEDIVLTLTLFEDKEMIEERLKKYANLFDDKVMKQLKRRHYTGWGRLSRKLINGIRDKQSGKTILDFLKSDGFANRNFMQLINDDSLTFKEAIQKAQVSGQGHSLHEQIANLAGSPAIKKGILQSVKVVDELVKVMGHKPENIVIEMARENQTTQKGQKNSRERMKRIEEGIKELGSQILKEHPVENTQLQNEKLYLYYLQNGRDMYVDQELDINRLSDYDVDHIVPQSFIKDDSIDNKVLTRSDKNRGKSDNVPSEEVVKKMKNYWRQLLNAKLITQRKFDNLTKAERGGLSELDKAGFIKRQLVETRQITKHVAQILDSRMNTKYDENDKLIREVKVITLKSKLVSDFRKDFQFYKVREINNYHHAHDAYLNAVVGTALIKKYPKLESEFVYGDYKVYDVRKMIAKSEQEIGKATAKRFFYSNIMNFFKTEITLANGEIRKRPLIETNEETGEIVWDKGRDFATVRKVLSMPQVNIVKKTEVQTGALTNESIYARGSFDKLISRKHRFESSKYGGFGSPTVTYSVLVVAKSKVQDGKVKKIKTGKELIGITLLDKLVFEKNPLKFIEDKGYGNVQIDKCIKLPKYSLFEFENGTRRMLASVMANNNSRGDLQKANEMFLPAKLVTLLYHAHKIESSKELEHEAYILDHYNDLYQLLSYIERFASLYVDVEKNISKVKELFSNIESYSISEICSSVINLLTLTASGAPADFKFLGTTIPRKRYGSPQSILSSTLIHQSITGLYETRIDLSQLGGD

SEQ ID NO: 1190 - protein, 1371 aa, Streptococcus dysgalactiae
MDKKYSIGLDIGTNSVGWAVITDDYKVPSKKFKVLGNTDRHSIKKNLIGALLFDSGETAEATRLKRTARRRYTRRKNRIRYLQEIFSSEMSKVDDSFFHRLEESFLVEEDKKHERHPIFGNIVDEVAYHEKYPTIYHLRKKLADSTDKADLRLIYLALAHMIKFRGHFLIEGDLNPDNSDVDKLFIQLVQTYNQLFEEKPINASGVDAKAILSARLSKSKRLENLIAQLPGEKKNGLFGNLIALSLGLTPNFKSNFDLAEDAKLQLSKDTYDDDLDNLLAQIGNQYADLFLAAKNLSDAILLSDILRVNSEITKAPLSASMIKRYDEHHQDLTLLKALVRQQLPEKYKEIFFDQSKNGYAGYIDGGASQEEFYKFIKPILEKMDGTEELLAKLNREDLLRKQRTFDNGSIPHQIHLGELHAILRRQEDFYPFLKDNREKIEKILTFRIPYYVGPLARGNSRFAWMTRKSEETITPWNFEEVVDKGASAQSFIERMTNFDKNLPNEKVLPKHSLLYEYFTVYNELTKVKYVTEGMRKPEFLSGKQKEAIVDLLFKTNRKVTVKQLKEDYFKKIECFDSVEISGVEDRFNASLGTYHDLLKIIKDKDFLDNEENEDILEDIVLTLTLFEDKEMIEERLKKYANLFDDKVMKQLKRRHYTGWGRLSRKLINGIRDKQSGKTILDFLKSDGFANRNFMQLINDDSLTFKEAIQKAQVSGQGHSLHEQIANLAGSPAIKKGILQSVKVVDELVKVMGHKPENIVIEMARENQTTQKGQKNSRERMKRIEEGIKELGSQILKEHPVENTQLQNEKLYLYYLQNGRDMYVDQELDINRLSDYDVDHIVPQSFIKDDSIDNKVLTRSDKNRGKSDNVPSEEVVKKMKNYWRQLLNAKLITQRKFDNLTKAERGGLSELDKAGFIKRQLVETRQITKHVAQILDSRMNTKYDENDKLIREVKVITLKSKLVSDFRKDFQFYKVREINNYHHAHDAYLNAVVGTALIKKYPKLESEFVYGDYKVYDVRKMIAKSEQEIGKATAKRFFYSNIMNFFKTEITLANGEIRKRPLIETNEETGEIVWDKGRDFATVRKVLSMPQVNIVKKTEVQTGALTNESIYARGSFDKLISRKHRFESSKYGGFGSPTVTYSVLVVAKSKVQDGKVKKIKTGKELIGITLLDKLVFEKNPLKFIEDKGYGNVQIDKCIKLPKYSLFEFENGTRRMLASVMANNNSRGDLQKANEMFLPAKLVTLLYHAHKIESSKELEHEAYILDHYNDLYQLLSYIERFASLYVDVEKNISKVKELFSNIESYSISEICSSVINLLTLTASGAPADFKFLGTTIPRKRYGSPQSILSSTLIHQSITGLYETRIDLSQLGGD

SEQ ID NO: 1191 - protein, 1370 aa, Streptococcus gallolyticus; identical to SEQ ID NO: 204

SEQ ID NO: 1192 - protein, 1375 aa, Streptococcus infantarius
MEKSYSIGLDIGTNSVGWAVITDDYKVPAKKMKVLGNTDKKYIKKNLLGALLFDSGETAEVTRLKRTARRRYTRRKNRLRYLQEIFAKEMTKVDESFFQRLEESFLTDDDKTFDSHPIFGNKAEEDAYHQKFPTIYHLRKYLADSQEKADLRLVYLALAHMIKYRGHFLIEGELNAENTDVQKLFNVFVETYDKIVDESHLSEIEVDASSILTEKVSKSRRLENLIKQYPTEKKNTLFGNLIALALGLQPNFKTNFKLSEDAKLQFSKDTYEEDLEELLGKVGDDYADLFISAKNLYDAILLSGILTVDDNSTKAPLSASMIKRYVEHHEDLEKLKEFIKINKLKLYHDIFKDKTKNGYAGYIDNGVKQDEFYKYLKTILTKIDDSDYFLDKIERDDFLRKQRTFDNGSIPHQIHLQEMHSILRRQGDYYPFLKENQAKIEKILTFRIPYYVGPLARKDSRFAWANYHSDEPITPWNFDEVVDKEKSAEKFITRMTLNDLYLPEEKVLPKHSHVYETFTVYNELTKIKYVNEQGESFFFDANMKQEIFDHVFKENRKVTKAKLLSYLNNEFEEFRINDLIGLDKDSKSFNASLGTYHDLKKILDKSFLDDKTNGQIIEDIVLTLTLFEDRDMIHERLQKYSDFFTSQQLKKLERRHYTGWGRLSYKLINGIRNKENNKTILDFLIDDGHANRNFMQLINDESLSFKTIIQEAQVVGDVDDIEAVVHDLPGSPAIKKGILQSVKIVDELVKVMGDNPDNIVIEMARENQTTGYGRNKSNQRLKRLQDSLKEFGSDILSKKKPSYVDSKVENSHLQNDRLFLYYIQNGKDMYTGEELDIDRLSDYDIDHIIPQAFIKDNSIDNKVLTSSAKNRGKSDDVPSIEIVRNRRSYWYKLYKSGLISKRKFDNLTKAERGGLTEADKAGFIKRQLVETRQITKHVAQILDARFNTKRDENDKVIRDVKVITLKSNLVSQFRKEFKFYKVREINDYHHAHDAYLNAVVGTALLKKYPKLTPEFVYGEYKKYDVRKLIAKSSDDYSEMGKATAKYFFYSNLMNFFKTEVKYADGRVFERPDIETNADGEVVWNKQKDFDIVRKVLSYPQVNIVKKVEAQTGGFSKESILSKGDSDKLIPRKTKKVYWNTKKYGGFDSPTVAYSVLVVADIEKGKAKKLKTVKELVGISIMERSFFEENPVSFLEKKGYHNVQEDKLIKLPKYSLFEFEGGRRRLLASATELQKGNEVMLPAHLVELLYHAHRIDSFNSTEHLKYVSEHKKEFEKVLSCVENFSNLYVDVEKNLSKVRAAAESMTNFSLEEISASFINLLTLTALGAPADFNFLGEKIPRKRYTSTKECLSATLIHQSVTGLYETRIDLSKLGEE

SEQ ID NO: 1193 - protein, 1368 aa, Streptococcus iniae
MRKPYSIGLDIGTNSVGWAVITDDYKVPSKKMRIQGTTDRTSIKKNLIGALLFDNGETAEATRLKRTTRRRYTRRKYRIKELQKIFSSEMNELDIAFFPRLSESFLVSDDKEFENHPIFGNLKDEITYHNDYPTIYHLRQTLADSDQKADLRLIYLALAHIIKFRGHFLIEGNLDSENTDVHVLFLNLVNIYNNLFEEDIVETASIDAEKILTSKTSKSRRLENLIAEIPNQKRNMLFGNLVSLALGLTPNFKTNFELLEDAKLQISKDSYEEDLDNLLAQIGDQYADLFIAAKKLSDAILLSDIITVKGASTKAPLSASMVQRYEEHQQDLALLKNLVKKQIPEKYKEIFDNKEKNGYAGYIDGKTSQEEFYKYIKPILLKLDGTEKLISKLEREDFLRKQRTFDNGSIPHQIHLNELKAIIRRQEKFYPFLKENQKKIEKLFTFKIPYYVGPLANGQSSFAWLKRQSNESITPWNFEEVVDQEASARAFIERMTNFDTYLPEEKVLPKHSPLYEMFMVYNELTKVKYQTEGMKRPVFLSSEDKEEIVNLLFKKERKVTVKQLKEEYFSKMKCFHTVTILGVEDRFNASLGTYHDLLKIFKDKAFLDDEANQDILEEIVWTLTLFEDQAMIERRLVKYADVFEKSVLKKLKKRHYTGWGRLSQKLINGIKDKQTGKTILGFLKDDGVANRNFMQLINDSSLDFAKIIKNEQEKTIKNESLEETIANLAGSPAIKKGILQSIKIVDEIVKIMGQNPDNIVIEMARENQSTMQGIKNSRQRLRKLEEVHKNTGSKILKEYNVSNTQLQSDRLYLYLLQDGKDMYTGKELDYDNLSQYDIDHIIPQSFIKDNSIDNTVLTTQASNRGKSDNVPNIETVNKMKSFWYKQLKSGAISQRKFDHLTKAERGALSDFDKAGFIKRQLVETRQITKHVAQILDSRFNSNLTEDSKSNRNVKIITLKSKMVSDFRKDFGFYKLREVNDYHHAQDAYLNAVVGTALLKKYPKLEAEFVYGDYKHYDLAKLMIQPDSSLGKATTRMFFYSNLMNFFKKEIKLADDTIFTRPQIEVNTETGEIVWDKVKDMQTIRKVMSYPQVNIVMKTEVQTGGFSKESIWPKGDSDKLIARKKSWDPKKYGGFDSPIIAYSVLVVAKIAKGKTQKLKTIKELVGIKIMEQDEFEKDPIAFLEKKGYQDIQTSSIIKLPKYSLFELENGRKRLLASAKELQKGNELALPNKYVKFLYLASHYTKFTGKEEDREKKRSYVESHLYYFDEIMQIIVEYSNRYILADSNLIKIQNLYKEKDNFSIEEQAINMLNLFTFTDLGAPSAFKFFNGDIDRKRYSSTNEIINSTLIYQSPTGLYETRIDLSKLGGK

SEQ ID NO: 1194 - protein, 1392 aa, Streptococcus mitis
MNNNNYSIGLDIGTNSVGWAVITDDYKVPSKKMKVLGNTDKHFIKKNLIGALLFDEGATAEDRRFKRTARRRYTRRKNRLRYLQEIFSEEMSKVDSSFFHRLDDSFLVPEDKRGSKYPIFATLAEEKEYHKKFPTIYHLRKHLADSKEKTDLRLIYLALAHMIKYRGHFLYEESFDIKNNDIQKIFSEFISIYDNTFEGSSLSGQNAQVEAIFTDKISKSAKRERILKLFAYEKSTDLFSEFLKLIVGNQADFKKHFDLEEKAPLQFSKDTYDEDLENLLGQIGDDFADLFLVAKKLYDAILLSGILTVTDSSTKAPLSASMIERYENHQKDLAALKQFIQNNLQEKYDEVFSDQSKDGYARYINGKTTQEAFYKYIKNLLSKFEGSDYFLDKIEREDFLRKQRTFDNGSIPHQIHLQEMNAIIRRQGEHYPFLKEYKEKIETILTFRIPYYVGPLARGNRNFAWLTRNSDQAIRPWNFEEIVDQASSAEEFINKMTNYDLYLPEEKVLPKHSLLYETFAVYNELTKVKFISEGLRDYQFLDSGQKKQIVNQLFKEKRKVTEKDIIQYLHNVDGYDGIELKGIEKQFNASLSTYHDLLKIIKDKEFMDDPKNEEILENIVHTLTIFEDREMIKQRLAQYASIFDKKVIKALTRRHYTGWGKLSAKLINGICDKKTGKTILDYLIDDGYSNRNFMQLINDDGLSFKDIIQKAQVVGKTNDVKQVVQELPGSPAIKKGILQSIKLVDELVKVMGHAPESIVIEIARENQTTARGKKNSQQRYKRIEDALKNLAPGLDSNILKEHPTDNIQLQNDRLFLYYLQNGKDMYTGEALDINQLSSYDIDHIVPQAFIKDDSLDNRVLTSSKDNRGKSDNVPSLEVVQKRKAFWQQLLDSKLISEHKFNNLTKAERGGLDERDKVGFIRRQLVETRQITKHVAQILDARFNTEVNEKDKKNRTVKIITLKSNLVSNFRKEFKLYKVREINDYHHAHDAYLNAVVAKAILKKYPKLEPGFVYGDYQKYDIKRYISRSKDPKEVEKATEKYFFYSNLLNFFKEEVHYADGTIVKRENIEYSKDTGEIAWNKEKDFATIKKVLSLPQVNIVKKTEIQTHGLDRGKPRGLFNSNPSPKPSEDRKENLVPIKQGLDPRKYGGYAGISNSYAVLVKAIIEKGAKKQQKTVLEFQGISILDKINFEKNKENYLLEKGYIKILSTITLPKYSLFEFPDGTRRRLASILSTNNKRGEIHKGNELVIPEKYTTLLYHAKNINKTLEPEHLEYVEKHRNDFAKLLEYVLNFNDKYVGALKNGERIRQAFIDWETVDIEKLCFSFIGPRNSKNAGLFELTSQGSASDFEFLGVKIPRYRDYTPSSLLNATLIHQSITGLYETRIDLSKLGED

SEQ ID NO: 1195 - protein, 1134 aa, Streptococcus mutans
MANGKILGLDIGIASVGVGIIDKETGKIIHVNSRIFPAATADSNVERRGFRQGRRLVRRKKHRKVRLADLFLDSNLLTDFSKVSLNLNPYQLRVKGLNEELSNEELFIALKSIVSRRGISYLDDASEDSGANSSEYGKAVEENRKLLEDRTPGQIQLERFEKYGKVRGDFTVVENGENHRLINVFSTSAYKKEAERILRRQQEFNMRIADEFIEAYLTILTGKRKYYHGPGNEKSRTDYGRFRTDGTTLDNIFGILIGKCTFYPDEYRAAKASYTAQEFNLLNDLNNLTVPTETKKLSEEQKRQIIEHAKTVKTLGAPTLLKYIVKLVGCSADDIKGYRIDKSDKPEIHTFEAYRKMRTMELIKVDDLSRESLDALAHILTLNTEREGIEEAIRDRFTNKEFNQEQINELVLFRKNNSSLFGKGWHNFSLKLMKELIPELYETSEEQMTILTRLGKQRVKKSSNRTNYIDEKELTEEIYNPVVAKSVRQAIKIINLATKKYGVFDNIVIEMARESNEDDEKKAIQNAQKANEDEKKAALLKAAHQFNGKEELPDSIFHGHKELLTKIRLWHQQGEKCLYTGKTIFINDLIHNPYKYEIDHILPLSLSFDDSLANKVLVLSTANQEKGQRTPFQSLDSMDGAWTYREFKSYVKGLKTLSNKKKDYLLTEENIDKIEVKQKFIERNLVDTRYSSRVVLNALQDFYKERKFDTKISVVRGQFTSQLRRKWRIEKTRETYHHHAVDALIIAASSQLNLWKKQNNPLISYKEDQFVDPETGEILSLSDDEYKKLVFKAPYEHFVDTLKSKKFEDSILFSYQVDSKYNRKISGATICGTRKAQLGKDTQEETYVLGKIKDIYSQKGYEDFIKKYKKDKTQFLMYHKDPQTFEKVIEEILKTYPDKELNEKGKEVSCNPFEKYRQENGPVRKYSKKGNGPEIKSLKYYDEVLGKNIDITPKNSLNKVVLRSLNPWRTDVYFNHETRKYEFLGLKYSDLRYLKGEHRYGILIGDYKKIKDKEGIEKESEFKFTLYKNDLILIKDTAKGKEELFRFWSRTGKDNAKTFEKNKIELKPYSKSQFEKGEDTNVLGKLYASSNQLQKSFGTLENLSIYKVRTDVLGNKYFIKKEGDKPQLNFKKKL

SEQ ID NO: 1196 - protein, 1134 aa, Streptococcus mutans; identical to SEQ ID NO: 1195

SEQ ID NO: 1197 - protein, 1128 aa, Streptococcus mutans
MANSKILGLDIGIASVGVGIIDKETGKIIHVNSRIFPAATADSNVERRGFRQGRRLVRRKKHRKVRLADLFLDSNLLTDFSKVSLNLNPYQLRVKGLNEELSNEELFIALKSIVSRRGISYLDDASEDSGANSSEYGKAVEENRKLLEDRTPGQIQLERFEKYGKVRGDFTVVENGENHRLINVFSTSAYKKEAERILRRQQEFNIRIADEFIEAYLTILTGKRKYYHGPGNEKSRTDYGRFRTDGTTLDNIFGILIGKCTFYPDEYRAAKASYTAQEFNLLNDLNNLTVPTETKKLSEEQKRQIIEHAKTVKTLGAPTLLKYIAKLVGCSADDIKGYRIDKSDKPEIHTFEAYRKMRTMELIKVADLSRESLDALAHILTLNTEREGIEEAIRDRFTNKEFNQEQINELVLFRKNNSSLFGKGWHNFSLKLMKELIPELYETSEEQMTILTRLGKQRVKKSSNRTNYIDEKELTEEIYNPVVAKSVRQAIKIINLATKKYGVFDNIVIEMARESNEDDEKKAIQNAQKANEDEKEAALLKAAHQFNGKEELPDSIFHGHKELLTKIRLWHQQGEKCLYTGKTIFINDLIHNPYKYEIDHILPLSLSFDDSLANKVLVLSTANQEKGQRTPFQSLDSMDGAWTYREFKAYVKGLKTLSNKKKDYLLNEEDINKNEVKQKFIERNLVDTRYSSRVVLNTLQDFYKKREFDTKISVVRGQFTSQIRRKWRIEKTRETYHHHAVDALIIAASSQLNLWKKQNNPLISYKEDQFVDPETGEILSLSDDEYKELVFKAPYDHFVDTLKSKKFEDSILFSYQVDSKYNRKISDATIYGTRKARLGKDSQEETYVLGKIKDIYSQKGYEDFIKKYKKDKTQFLMYHKDPQTFEKVIEEILKTYSDKELNEKGKEVPCNPFEKYRQENGPVRKYSKKGNGPEIKSIKYYDNKLGNHIDITPNNSHHQVVLQSLKPWRTDVYFNPKSGKYELMGLKYSDLRFEKVSGDYGISVKKYNEIKSKEGVDENSEFKFTLYKNDLILIKDTESGEQELFRFLSRTMPNQKHYVELKPYDKSKFEGHQKLMDIFGEVAKGGQCLKGLNKSNISIYKVKTDVLGNKYFIKKEGDQPQLNFKKKI

SEQ ID NO: 1198 - protein, 1128 aa, Streptococcus mutans; identical to SEQ ID NO: 1197

SEQ ID NO: 1199 - protein, 1338 aa, Streptococcus mutans
MDLIGTNSVGWAVVTDDYKVPAKKMKVLGNTDKSHIKKNLLGALLFDSGNTAADRRLKRTARRRYTRRRNRILYLQEIFAEEMSKVDDSFFHRLEDSFLVTEDKRGERHPIFGNLEEEVKYHENFPTIYHLRQYLADNPEKVDLRLVYLALAHIIKFRGHFLIEGKFDTRNNDVQRLFQEFLAVYDNTFENSSLQEQNVQVEEILTDKISKSAKKDRVLKLFPNEKSNGRFAEFLKLIVGNQADFKKHFELEEKAPLQFSKDTYEEELEVLLAQIGDNYAELFLSAKKLYDSILLSGILTVTDVSTKAPLSASMIQRYNEHQMDLAQLKQFIRQKLSDKYNEVFSDVSKDGYAGYIDGKTNQEAFYKYLKGLLNKIEGSGYFLDKIEREDFLRKQRTFDNGSIPHQIHLQEMRAIIRRQAEFYPFLADNQDRIEKILTFRIPYYVGPLARGKSDFAWLSRKSADKITPWNFDEIVDKESSAEAFINRMTNYDLYLPNQKVLPKHSLLYEKFTVYNELTKVKYKTEQGKTAFFDANMKQEIFDGVFKVYRKVTKDKLMDFLEKEFDEFRIVDLTGLDKENKAFNASYGTYHDLRKILDKDFLDNSKNEKILEDIVLTLTLFEDREMIRKRLENYSDLLTKEQVKKLERRHYTGWGRLSAELIHGIRNKESRKTILDYLIDDGNSNRNFMQLINDDALSFKEEIAKAQVIGETDNLNQVVSDIAGSPAIKKGILQSLKIVDELVKIMGHQPENIVVEMARENQFTNQGRRNSQQRLKGLTDSIKEFGSQILKEHPVEHSQLQNDRLFLYYLQNGRDMYTGEELDIDYLSQYDIDHIIPQAFIKDNSIDNRVLTSSKENRGKSDDVPSKNVVRKMKSYWSKLLSAKLITQRKFDNLTKAERGGLTDDDKAGFIKRQLVETRQITKHVARILDERFHTETDENNKKIRQVKIVTLKSNLVSNFRKEFELYKVREINDYHHAHDAYLNAVIGKALLGVYPQLEPEFVYGDYPHFHGHKENKATAKKFFYSNIMNFFKKDDVRTDKNGEIIWKKDEHISNIKKVLSYPQVNIVKKVEEQTGGFSKESILPKGNSDKLIPRKTKKFYWDTKKYGGFDSPIVAYSILVIADIEKGKSKKLKTVKALVGVTIMEKMTFERDPVAFLERKGYRNVQEENIIKLPKYSLFKLENGRKRLLASARELQKGNEIVLPNHLGTLLYHAKNIHKVDEPKHLDYVDKHKDEFKELLDVVSNFSKKYTLAEGNLEKIKELYAQNNGEDLKELASSFINLLTFTAIGAPATFKFFDKNIDRKRYTSTTEILNATLIHQSITGLYETRIDLSKLGGD

SEQ ID NO: 1200 - protein, 1338 aa, Streptococcus mutans; identical to SEQ ID NO: 1199

SEQ ID NO: 1201 - protein, 1345 aa, Streptococcus mutans
MKKPYSIGLDIGTNSVGWAVVTDDYKVPAKKMKVLGNTDKSHIEKNLLGALLFDSGNTAEDRRLKRTARRRYTRRRNRILYLQEIFSEEMGKVDDSFFHRLEDFFLVTEDKRGERHPIFGNLEEEVKYHENFPTIYHLRQYLADNPEKVDLRLVYLALAHIIKFRGHFLIEGKFDTRNNDVQRLFQEFLAVYDNTFENSSLQEQNVQVEEILTDKISKSAKKDRVLKLFPNEKSNGRFAEFLKLIVGNQADFKKHFELEEKAPLQFSKDTYEEELEVLLAQIGDNYAELFLSAKKLYDSILLSGILTADDSSTKAPLSASMIQRYNEHQMDLAQLKQFIRQKLSDKYNEVFSDVSKDGYAGYIDGKTNQEAFYKYLKGLLNKIEGSGYFLDKIEREDFLRKQRTFDNGSIPHQIHLQEMRAIIRRQSEFYPFLADNQDRIEKILTFRIPYYVGPLARGKSDFAWLSRKSADKITPWNFDEIVDKESSAEAFINRMTNYDLYLPNQKVLPKHSLLYEKFTVYNELTKVKYKTEQGETAFFDANMKQEIFDGVFKVYRKVTKDKLMDFLEKEFDEFRIVDLTGLDKENKAFNASYGTYHDLRKILDKDFLDNSKNEKILEDIVLTLTLFEDREMIRKRLKNYSDLLTKEQLKKLERRHYTGWGRLSAELIHGIRNKESRKTILDYLIDDGNSNRNFMQLINDDALSFKEEIAKAQVIGETDNLNQVVSDIAGSPAIKKGILQSLKIVDELVKIMGHQPENIVVEMARENQFTNQGRRNSQQRLKGLTDSIKEFGSQILKEHPVENSQLQNDRLFLYYLQNGRDMYTGEELDIDYLSQYDIDHIIPQAFIKDNSIDNRVLTSSKENRGKSDDVPSKDVVRKMKPYWSKLLSAKLITQRKFDNLTKAERGGLTDDDKAGFIKRQLVETRQITKHVARILDERFNTETDENNKKIRQVKIVTLKSNLVSNFRKEFELYKVREINDYHHAHDAYLNAVIGKALLGVYPQLEPEFVYGDYPHFHGHEENKATAKKFFYSNIMNFFKKDDVRTDKNGEIIWKKDEHISNIKKVLSYPQVNIVKKVEEQTGGFSKESILPKGNSDKLIPRKTKKFYWDTKKYGGFDSPIVAYSILVIADIEKGKSKKLKTVKALVGVTIMEKMTFERDPVAFLERKGYRNVQEENIIKLPKYSLFKLENGRKRLLASARELQKGNEIVLPNHLGTLLYHAKNIHKVDEPKHLDYVDKHKDEFKELLDVVSNFSKKYTLAEGNLEKIKELYAQNNGEDLKELASSFINLLTFTAIGAPATFKFFDKNIDRKRYTSTTEILNATLIHQSITGLYETRIDLSKLGGD

SEQ ID NO: 1202 - protein, 1345 aa, Streptococcus mutans; identical to SEQ ID NO: 1201

SEQ ID NO: 1203 - protein, 1229 aa, Streptococcus mutans
MKKPYSIGLDIGTNSVGWAVVTDDYKVPAKKMKVLGNTDKSHIEKNLLGALLFDSGNTAEDRRLKRTARRRYTRRRNRILYLQEIFSEEMGKVDDSFFHRLEDSFLVTEDKRGERHPIFGNLEEEVKYHENFPTIYHLRQYLADNPEKVDLRLVYLALAHIIKFRGHFLIEGKFDTRNNDVQRLFQEFLAVYDNTFENSSLQEQNIQVEEILTDKISKSAKKDRVLKLFPNEKSNGRFAEFLKLIVGNQADFKKHFELEEKAPLQFSKDTYEEELEVLLAQIGDNYAELFLSAKKLYDSILLSGILTVTDVGTKAPLSASMIQRYNEHQMDLTQLKQFIRQKLSDKYNEVFSDVSKDGYAGYIDGKTNQEAFYKYLKGLLNKIEGSGYFLDKIEREDFLRKQRTFDNGSIPHQIHLQEMRAIIRRQAEFYPFLADNQDRIEKILTFRIPYYVGPLARGKSDFAWLSRKSADKITPWNFDEIVDKESSAEAFINRMTNYDLYLPNQKVLPKHSLLYEKFTVYNELTKVKYKTEQGKTAFFDANMKQEIFDGVFKVYRKVTKDKLMDFLEKEFDEFRIVDLTGLDKENKVFNASYGTYHDLCKILDKDFLDNSKNEKILEDIVLTLTLFEDREMIRKRLENYSDLLTKEQVKKLERRHYTGWGRLSAELIHGIRNKESRKTILDYLIDDGNSNRNFMQLINDDALSFKEEIAKAQVIGETDNLNQVVSDIAGSPAIKKGILQSLKIVDELVKIMGHQPENIVVEMARENQFTNQGRRNSQQRLKGLTDSIKEFGSQILKEHPVENSQLQNDRLFLYYLQNGRDMYTGEELDIDYLSQYDIDHIIPQAFIKDNSIDNRVLTSSKENRGKSDDVPSKDVVRKMKPYWSKLLSAKLITQRKFDNLTKAERGGLTDDDKAGFIKRQLVETRQITKHVARILDERFNTETDENNKKIRQVKIVTLKSNLVSNFRKEFELYKVREINDYHHAHDAYLNAVIGKALLGVYPQLEPEFVYGDYPHFHGHEENKATAKKFFYSNIMNFFKKDDVRTDKNGEIIWKKDEHISNIKKVLSYPQVNIVKKVEEQTIGQNGGLFDDNPKSPLEVIPSKLVPLKKALNPEKYGGYQKPTTAYPILLIVDTKQLIPISVMDKKRFEQNPVKFLKDKGYQQIEKNNFVKLPKYTLVDIGNGIKRLWASSKEVHKGNQLVVSKKSQDLLYHAHHLDNDYSNEYVKNHY

SEQ ID NO: 1204 - protein, 1229 aa, Streptococcus mutans; identical to SEQ ID NO: 1203

SEQ ID NO: 1205 - protein, 1345 aa, Streptococcus mutans
MKKPYSIGLDIGTNSVGWAVVTDDYKVPAKKMKVLGNTDKSHIEKNLLGALLFDSGNTAEDRRLKRTARRRYTRRRNRILYLQEIFSEEMGKVDDSFFHRLEDSFLVTEDKRGERHPIFGNLEEEVKYHENFPTIYHLRQYLADNPEKVDLRLVYLALAHIIKFRGHFLIEGKFDTRNNDVQRLFQEFLAVYDNTFENSSLQEQNVQVEEILTDKISKSAKKDRVLKLFPNEKSNGRFAEFLKLIVGNQADFKKHFELEEKAPLQFSKDTYEEELEVLLAQIGDNYAELFLSAKKLYDSILLSGILTVTDVGTKAPLSASMIQRYNEHQMDLAQLKQFIRQKLSDKYNEVFSDVSKDGYAGYIDGKTNQEAFYKYLKGLLNKIEGSGYFLDKIEREDFLRKQRTFDNGSIPHQIHLQEMRAIIRRQAEFYPFLADNQDRIEKLLTFRIPYYVGPLARGKSDFAWLSRKSADKITPWNFDEIVDKESSAEAFINRMTNYDLYLPNQKVLPKHSLLYEKFTVYNELIKVKYKTEQGKTAFFDANMKQEIFDGVFKVYRKVTKDKLMDFLEKEFDEFRIVDLTGLDKENKVFNASYGTYHDLCKILDKDFLDNSKNEKILEDIVLTLTLFEDREMIRKRLENYSDLLTKEQVKKLERRHYTGWGRLSAELIHGIRNKESRKTILDYLIDDGNSNRNFMQLINDDALSFKEEIAKAQVIGETDNLNQVVSDIAGSPAIKKGILQSLKIVDELVKIMGHQPENIVVEMARENQFTNQGRRNSQQRLKGLTDSIKEFGSQILKEHPVENSQLQNDRLFLYYLQNGRDMYTGEELDIDYLSQYDIDHIIPQAFIKDNSIDNRVLTSSKENRGKSDDVPSKDVVRKMKSYWSKLLSAKLITQRKFDNLTKAERGGLTDDDKAGFIKRQLVETRQITKHVARILDERFNTETDENNKKIRQVKIVTLKSNLVSNFRKEFELYKVREINDYHHAHDAYLNAVIGKALLGVYPQLEPEFVYGDYPHFHGHKENKATAKKFFYSNIMNFFKKDDVRTDKNGEIIWKKDEHISNIKKVLSYPQVNIVKKVEEQTGGFSKESILPKGNSDKLIPRKTKKFYWDTKKYGGFDSPIVAYSILVIADIEKGKSKKLKTVKALVGVTIMEKMTFERDPVAFLERKGYRNVQEENIIKLPKYSLFKLENGRKRLLASARELQKGNEIVLPNHLGTLLYHAKNIHKVDEPKHLDYVDKHKDEFKELLDVVSNFSKKYTLAEGNLEKIKELYAQNNGEDLKELASSFINLLTFTAIGAPATFKFFDKNIDRKRYTSTTEILNATLIHQSITGLYETRIDLNKLGGD

SEQ ID NO: 1206 - protein, 1350 aa, Streptococcus mutans
MKKPYSIGLDIGTNSVGWAVVTDDYKVPAKKMKVLGNTDKSHIEKNLLGALLFDSGNTAEDRRLKRTARRRYTRRRNRILYLQEIFSEEMGKVDDSFFHRLEDSFLVTEDKRGERHPIFGNLEEEVKYHENFPTIYHLRQYLADNPEKVDLRLVYLALAHIIKFRGHFLIEGKFDTRNNDVQRLFQEFLAVYDNTFENSSLQEQNVQVEEILTDKISKSAKKDRVLKLFPNEKSNGRFAEFLKLIVGNQADFKKHFELEEKAPLQFSKDTYEEELEVLLAQIGDNYAELFLSAKKLYDSILLSGILTVTDVSTKAPLSASMIQRYNEHQMDLTQLKQFIRQKLSDKYNEVFSDVSKDGYAGYIDGKTNQEAFYKYLKGLLNKIEGSGYFLDKIEREDFLRKQRTFDNGSIPHQIHLQEMRAIIRRQAEFYSFLADNQDRIEKILTFRIPYYVGPLARGKSDFAWLSRKSADKITPWNFDEIVDKESSAEAFINRMTNYDLYLPNQKVLPKHSLLYEKFTVYNELTKVKYKTEQGKTAFFDANMKQEIFDGVFKVYRKVTKDKLMDFLEKEFDEFRIVDLTGLDKENKAFNASYGTYHDLRKILDKDFLDNSKNEKILEDIVLTLTLFEDREMIRKRLENYSDLLTKEQVKKLERRHYTGWGRLSAELIHGIRNKESRKTILDYLIDDGNSNRNFMQLINDDALSFKEEIAKAQVIGETDNLNQVVSDIAGSPAIKKGILQSLKIVDELVKIMGHQPENIVVEMARENQFTNQGRRNSQQRLKGLTDSIKEFGSQILKEHPVENSQLQNDRLFLYYLQNGRDMYTGEELDIDYLSQYDIDHIIPQAFIKDNSIDNRVLTSSKENRGKSDDVPSEDVVNRMRPFWNKLLSSGLISQRKYNNLTKKELTLDDKAGFIKRQLVETRQITKHVARMLDERFNKEFDDNNKRIRKVKIVTLKSNLVSSFRKEFELYKVREINDYHHAHDAYLNAVVVKALLVKYSKLEPEFVYGEYPKYNSYRERKTATQKMFFYSNIMNMFKSKVKLADDQIVERPMIEVNDETGEIAWDKTKHITTVKKVLSYPQVNIVKKVEEQTIGQNGGLFDDNPKSPLEVIPSKLVPLKKALNPEKYGGYQKPTTAYPILLIVDTKQLIPISVMDKKRFEQNPVKFLKDKGYQQIEKNNFVKLPKYTLVDIGNGIKRLWASSKEVHKGNQLVVSKKSQDLLYHAHHLDNDYSNEYVKNHYQQFDILFNEITSFSKKCKLGKEHIQKIEEAYSKERDSASIEELADGFIKLLGFTQLGATSPFSFLGIKLNQKQYTGKKDYLLPCMEATLIHQSITGLYETRIDLSKLGGD

SEQ ID NO: 1207 - protein, 1350 aa, Streptococcus mutans
MKKPYSIGLDIGTNSVGWAVVTDDYKVPAKKMKVLGNTDKSHIEKNLLGALLFDSGNTAEDRRLKRTARRRYTRRRNRILYLQEIFSEEMGKVDDSFFHRLEDSFLVTEDKRGERHPIFGNLEEEVKYHENFPTIYHLRQYLADNPEKVDLRLVYLALAHIIKFRGHFLIEGKFDTRNNDVQRLFQEFLAVYDNTFENSSLQEQNVQVEEILTDKISKSAKKDRVLKLFPNEKSNGRFAEFLKLIVGNQADFKKHFELEEKAPLQFSKDTYEEELEVLLAQIGDNYAELFLSAKKLYDSILLSGILTVTDVSTKAPLSASMIQRYNEHQMDLTQLKQFIRQKLSDKYNEVFSDVSKDGYAGYIDGKTNQEAFYKYLKGLLNKIEGSGYFLDKIEREDFLRKQRTFDNGSIPHQIHLQEMRAIIRRQAEFYPFLADNQDRIEKILTFRIPYYVGPLARGKSDFAWLSRKSADKITPWNFDEIVDKESSAEAFINRMTNYDLYLPNQKVLPKHSLLYEKFTVYNELTKVKYKTEQGKTAFFDANMKQEIFDGVFKVYRKVTKDKLMDFLEKEFDEFRIVDLTGLDKENKAFNASYGTYHDLRKILDKDFLDNSKNEKILEDIVLTLTLFEDREMIRKRLKNYSDLLTKEQLKKLERRHYTGWGRLSAELIHGIRNKESRKTILDYLIDDGNSNRNFMQLINDDALSFKEEIAKAQVIGETDNLNQVVSDIAGSPAIKKGILQSLKIVDELVKIMGHQPENIVVEMARENQFTNQGRQNSQQRLKGLTDSIKEFGSQILKEHPVENSQLQNDRLFLYYLQNGRDMYTGEELDIDYLSQYDIDHIIPQAFIKDNSIDNRVLTSSKENRGKSDDVPSEDVVNRMRPFWNKLLSSGLISQRKYNNLTKKELTLDDKAGFIKRQLVETRQITKHVARMLDERFNKEFDDNNKRICKVKIVTLKSNLVSSFRKEFELYKVREINDYHHAHDAYLNAVVVKALLVKYSKLEPEFVYGEYPKYNSYRERKTATQKMFFYSNIMNMFKSKVKLADDQIVERPMIEVNDETGEIAWDKTKHITTVKKVLSYPQVNIVKKVEEQTIGQNGGLFDDNPKSPLEVIPSKLVPLKKALNPEKYGGYQKPTTAYPILLIVDTKQLIPISVMDKKRFEQNPVKFLKDKGYQQIEKNNFVKLPKYTLVDIGNGIKRLWASSKEVHKGNQLVVSKKSQDLLYHAHHLDNDYSNEYVKNHYQQFDILFNEITSFSKKCKLGKEHIQKIEEAYSKERDSASIEELADGFIKLLGFTQLGATSPFSFLGIKLNQKQYTGKKDYLLPCMEATLIHQSITGLYETRIDLSKLGGD

SEQ ID NO: 1208 - protein, 1345 aa, Streptococcus mutans; identical to SEQ ID NO: 1205

SEQ ID NO: 1209 - protein, 1350 aa, Streptococcus mutans; identical to SEQ ID NO: 1206

SEQ ID NO: 1210 - protein, 1350 aa, Streptococcus mutans; identical to SEQ ID NO: 1207

SEQ ID NO: 1211 - protein, 1345 aa, Streptococcus mutans
MKKPYSIGLDIGTNSVGWAVVTDDYKVPAKKMKVLGNTDKSHIKKNLLGALLFDSGNTAADRRLKRTARRRYTRRRNRILYLQEIFAEEMSKVDDSFFHRLEDSFLVTEDKRGERHPIFGNLEEEVKYHENFPTIYHLRQYLADNPEKVDLRLVYLALAHIIKFRGHFLIEGKFDTRNNDVQRLFQEFLAVYDNTFENSSLQEQNVQVEEILTDKISKSAKKDRVLKLFPNEKSNGRFAEFLKLIVGNQADFKKHFELEEKAPLQFSKDTYEEELEVLLTQIGDNYAELFLSAKKLYDSILLSGILTVTDVSTKAPLSASMIQRYNEHQMDLAQLKQFIRQKLSDKYNEVFSDVSKDGYAGYIDGKTNQEAFYKYLKGLLNKIEGSGYFLDKIEREDFLRKQRTFDNGSIPHQIHLQEMRAIIRRQAEFYPFLADNQDRIEKILTFRIPYYVGPLARGKSDFAWLSRKSADKITPWNFDEIVDKESSAEAFINRMTNYDLYLPNQKVLPKHSLLYEKFTVYNELTKVKYKTEQGKTAFFDANMKQEIFDGVFKVYRKVTKDKLMDFLEKEFDEFRIVDLTGLDKENKAFNASYGTYHDLRKILDKDFLDNSKNEKILEDIVLTLTLFEDREMIRKRLENYSDLLTKEQVKKLERRHYTGWGRLSAELIHGIRNKESRKTLLDYLIDDGNSNRNFMQLINDDALSFKEEIAKAQVIGETDNLNQVVSDIAGSPAIKKGILQSLKIVDELVKIMGHQPENIVVEMARENQFTNQGRRNSQQRLKGLTDSIKEFGSQILKEHPVENSQLQNDRLFLYYLQNGRDMYTGEELDIDYLSQYDIDHIIPQAFIKDNSIDNRVLTSSKENRGKSDDVPSKDVVRKMKPYWSKLLSAKLITQRKFDNLTKAERGGLTDDDKAGFIKRQLVETRQITKHVARILDERFNTETDENNKKIRQVKIVTLKSNLVSNFRKEFELYKVREINDYHHAHDAYLNAVIGKALLGVYPQLEPEFVYGDYPHFHGHEENKATAKKFFYSNIMNFFKKDDVRTDKNGEIIWKKDEHISNIKKVLSYPQVNIVKKVEEQTGGFSKESILPKGNSDKLIPRKTKKFYWDTKKYGGFDSPIVAYSILVIADIEKGKSKKLKTVKALVGVTIMEKMTFERDPVAFLERKGYRNVQEENIIKLPKYSLFKLENGRKRLLASARELQKGNEIVLPNHLGTLLYHAKNIHKVDEPKHLDYVDKHKDEFKELLDVVSNFSKKYTLAEGNLEKIKELYAQNNGEDLKELSSSFINLLTFTAIGAPAAFKFFDKNIDRKRYTSTTEILNATLIHQSITGLYETRIDLSKLGGD

SEQ ID NO: 1212 - protein, 1345 aa, Streptococcus mutans
MKKPYSIGLDIGTNSVGWAVVTDDYKVPAKKMKVLGNTDKSHIKKNLLGALLFDSGNTAADRRLKRTARRRYTRRRNRILYLQEIFAEEMSKVDDSFFHRLEDSFLVTEDKRGERHPIFGNLEEEVKYHENFPTIYHLRQYLADNPEKVDLRLVYLALAHIIKFRGHFLIEGKFDTRNNDVQRLFQEFLAVYDNTFENSSLQEQNVQVEEILTDKISKSAKKDRVLKLFPNEKSNGRFAEFLKLIVGNQADFKKHFELEEKAPLQFSKDTYEEELEVLLAQIGDNYAELFLSAKKLYDSILLSGILTVTDVSTKAPLSASMIQRYNEHQMDLAQLKQFIRQKLSDKYNEVFSDVSKDGYAGYIDGKTNQEAFYKYLKGLLNKIEGSGYFLDKIEREDFLRKQRTFDNGSIPHQIHLQEMRAIIRRQAEFYPFLADNQDRIEKILTFRIPYYVGPLARGKSDFAWLSRKSADKITPWNFDEIVDKESSAEAFINRMTNYDLYLPNQKVLPKHSLLYEKFTVYNELTKVKYKTEQGKTAFFDANMKQEIFDGVFKVYRKVTKDKLMDFLEKEFDEFRIVDLTGLDKENKAFNASYGTYHDLRKILDKDFLDNSKNEKILEDIVLTLTLFEDREMIRKRLENYSDLLTKEQVKKLERRHYTGWGRLSAELIHGIRNKESRKTILDYLIDDGNSNRNFMQLINDDALSFKEEIAKAQVIGETDNLNQVVSDIAGSPAIKKGILQSLKIVDELVKIMGHQPENIVVEMARENQFTNQGRRNSQQRLKGLTDSIKEFGSQILKEHPVEHSQLQNDRLFLYYLQNGRDMYTGEELDIDYLSQYDIDHIIPQAFIKDNSIDNRVLTSSKENRGKSDDVPSKNVVRKMKSYWSKLLSAKLITQRKFDNLTKAERGGLTDDDKAGFIKRQLVETRQITKHVARILDERFHTETDENNKKIRQVKIVTLKSNLVSNFRKEFELYKVREINDYHHAHDAYLNAVIGKALLGVYPQLEPEFVYGDYPHFHGHKENKATAKKFFYSNIMNFFKKDDVRTDKNGEIIWKKDEHISNIKKVLSYPQVNIVKKVEEQTGGFSKESILPKGNSDKLIPRKTKKFYWDTKKYGGFDSPIVAYSILVIADIEKGKSKKLKTVKALVGVTIMEKMTFERDPVAFLERKGYRNVQEENIIKLPKYSLFKLENGRKRLLASARELQKGNEIVLPNHLGTLLYHAKNIHKVDEPKHLDYVDKHKDEFKELLDVVSNFSKKYTLAEGNLEKIKELYAQNNGEDLKELASSFINLLTFTAIGAPATFKFFDKNIDRKRYTSTTEILNATLIHQSITGLYETRIDLSKLGGD

SEQ ID NO: 1213 - protein, 1345 aa, Streptococcus mutans
MKKPYSIGLDIGTNSVGWAVVTDDYKVPAKKMKVLGNTDKSHIKKNLLGALLFDSGNTAADRRLKRTARRRYTRRRNRILYLQEIFAEEMSKVDDSFFHRLEDSFLVTEDKRGERHPIFGNLEEEVKYHENFPTIYHLRQYLADNPEKVDLRLVYLALAHIIKFRGHFLIEGKFDTRNNDVQRLFQEFLAVYDNTFENSSLQEQNVQVEEILTDKISKSAKKDRVLKLFPNEKSNGRFAEFLKLIVGNQADFKKHFELEEKAPLQFSKDTYEEELEVLLAQIGDNYAELFLSAKKLYDSILLSGILTVTDVSTKAPLSASMIQRYNEHQMDLAQLKQFIRQKLSDKYNEVFSDVSKDGYAGYIDGKTNQEAFYKYLKGLLNKIEGSGYFLDKIEREDFLRKQRTFDNGSIPHQIHLQEMRAIIRRQAEFYPFLADNQDRIEKILTFRIPYYVGPLARGKSDFAWLSRKSADKITPWNFDEIVDKESSAEAFINRMTNYDLYLPNQKVLPKHSLLYEKFTVYNELTKVKYKTEQGKTAFFDANMKQEIFDGVFKVYRKVTKDKLMDFLEKEFDEFRIVDLTGLDKENKVFNASYGTYHDLCKILDKDFLDNSKNEKILEDIVLTLTLFEDREMIRKRLENYSDLLTKEQVKKLERRHYTGWGRLSAELIHGIRNKESRKTILDYLIDDGNSNRNFMQLINDDALSFKEEIAKAQVIGETDNLNQVVSDIAGSPAIKKGILQSLKIVDELVKIMGHQPENIVVEMARENQFTKQGRRNSQQRLKGLTDSIKEFGSQILKEHPVENSQLQNDRLFLYYLQNGRDMYTGEELDIDYLSQYDIDHIIPQAFIKDNSIDNRVLTSSKENRGKSDDVPSKDVVRKMKSYWSKLLSAKLITQRKFDNLTKAERGGLTDDDKAGFIKRQLVETRQITKHVARILDERFYTETDENNKKIRQVKIVTLKSNLVSNFRKEFELYKVREINDYHHAHDAYLNAVIGKALLGVYPQLEPEFVYGDYPHFHGHKENKATAKKFFYSNIMNFFKKDDVRTDKNGEIIWKKDEHISNIKKVLSYPQVNIVKKVEEQTGGFSKESILPKGNSDKLIPRKTKKFYWDTKKYGGFDSPIVAYSILVIADIEKGKSKKLKTVKALVGVTIMEKMTFERDPVAFLERKGYRNVQEENIIKLPKYSLFKLENGRKRLLASARELQKGNEIVLPNHLGTLLYHAKNIHKVDEPKHLDYVDKHKDEFKELLDVVSNFSKKYTLAEGNLEKIKELYAQNNGEDLKELASSFINLLTFTAIGAPATFKFFDKNIDRKRYTSTTEILNATLIHQSITGLYETRIDLSKLGGD

SEQ ID NO: 1214 - protein, 1345 aa, Streptococcus mutans
MKKPYSIGLDIGTNSVGWAVVTDDYKVPAKKMKVLGNTDKSHIKKNLLGALLFDSGNTAADRRLKRTARRRYTRRRNRILYLQEIFAEEMSKVDDSFFHRLEDSFLVTEDKRGERHPIFGNLEEEVKYHENFPTIYHLRQYLADNPEKVDLRLVYLALAHIIKFRGHFLIEGKFDTRNNDVQRLFQEFLAVYDNTFENSSLQEQNVQVEEILTDKISKSAKKDRVLKLFPNEKSNGRFAEFLKLIVGNQADFKKHFELEEKAPLQFSKDTYEEELEVLLAQIGDNYAELFLSAKKLYDSILLSGILTVTDVSTKAPLSASMIQRYNEHQMDLAQLKQFIRQKLSDKYNEVFSDVSKDGYAGYIDGKTNQEAFYKYLKGLLNKIEGSGYFLDKIEREDFLRKQRTFDNGSIPHQIHLQEMRAIIRRQAEFYPFLADNQDRIEKILTFRIPYYVGPLARGKSDFAWLSRKSADKITPWNFDEIVDKESSAEAFINRMTNYDLYLPNQKVLPKHSLLYEKFTVYNELTKVKYKTEQGKTAFFDANMKQEIFDGVFKVYRKVTKDKLMDFLEKEFDEFRIVDLTGLDKENKAFNASYGTYHDLRKILDKDFLDNSKNEKILEDIVLTLTLFEDREMIRKRLENYSDLLTKEQVKKLERRHYTGWGRLSAELIHGIRNKESRKTILDYLIDDGNSNRNFMQLINDDALSFKEEIAKAQVIGETDNLNQVVSDIAGSPAIKKGILQSLKIVDELVKIMGHQPENIVVEMARENQFTNQGRRNSQQRLKGLTDSIKEFGSQILKEHPVENSQLQNDRLFLYYLQNGRDMYTGEELDIDYLSQYDIDHIIPQAFIKDNSIDNRVLTSSKENRGKSDDVPSKNVVRKMKSYWSKLLSAKLITQRKFDNLTKAERGGLTDDDKAGFIKRQLVETRQITKHVARILDERFHTETDENNKKIRQVKIVTLKSNLVSNFRKEFELYKVREINDYHHAHDAYLNAVIGKALLGVYPQLEPEFVYGDYPHFHGHKENKATAKKFFYSNIMNFFKKDDVRTDKNGEIIWKKDEHISNIKKVLSYPQVNIVKKVEEQTGGFSKESILPKGNSDKLIPRKTKKFYWDTKKYGGFDSPIVAYSILVIADIEKGKSKKLKTVKALVGVTIMEKMTFERDPVAFLERKGYRNVQEENIIKLPKYSLFKLENGRKRLLASARELQKGNEIVLPNHLGTLLYHAKNIHKVDEPKHLDYVDKHKDEFKELLDVVSNFSKKYTLAEGNLEKIKELYAQNNGEDLKELSSSFINLLTFTAIGAPAAFKFFDKNIDRKRYTSTTEILNATLIHQSITGLYETRIDLSKLGGD

SEQ ID NO: 1215 - protein, 1345 aa, Streptococcus mutans; identical to SEQ ID NO: 1211

SEQ ID NO: 1216 - protein, 1345 aa, Streptococcus mutans; identical to SEQ ID NO: 1212

SEQ ID NO: 1217 - protein, 1345 aa, Streptococcus mutans; identical to SEQ ID NO: 1213

SEQ ID NO: 1218 - protein, 1345 aa, Streptococcus mutans; identical to SEQ ID NO: 1214

SEQ ID NO: 1219 - protein, 1345 aa, Streptococcus mutans; identical to SEQ ID NO: 1212

SEQ ID NO: 1220 - protein, 1345 aa, Streptococcus mutans; identical to SEQ ID NO: 1212

SEQ ID NO: 1221 - protein, 1345 aa, Streptococcus mutans; identical to SEQ ID NO: 1212

SEQ ID NO: 1222 - protein, 1345 aa, Streptococcus mutans; identical to SEQ ID NO: 1212

SEQ ID NO: 1223 - protein, 1359 aa, Streptococcus mutans
MKKPYSIGLDIGTNSVGWAVVTDDYKVPAKKMKVLGNTDKSHIKKNLLGALLFDSGNTAEDRRLKRTARRRYTRRRNRILYLQEIFAEEMMQVDESFFQRLDDSFLVEEDKRGSRYPIFGTLKEEKKYHKEFKTIYHLREKLANSTEKADLRLVYLSLAHMIKFRGHFLIEGQLKAENTNVQALFKDFVEVYDKTVEESHLSEMTVDALSILTEKVSKSRRLENLVECYPTEKKNTLFGNLIALSLGLQPNFKTNFQLSEDAKLQFSKDTYEEDLEGLLGEIGDEYADLFASAKNLYDAILLSGILAVDDNTTKAPLSASMVKRYKEHKEELAAFKRFIKEKLPKKYEEIFKDDTKNGYAGYVGADKKLRKRSGKLATEEEFYKYVKGILNKVEGADVWLDKIDREDFLRKQRTFDNGSIPHQIHLQEMHAILRRQGEHYPFLKENQDKIEKILTFRIPYYVGPLVRKGSRFAWAEYKADEKITPWNFDDILDKEKSAEKFITRMTLNDLYLPEEKVLPKHSLLYETFTVYNELTKVKYVNEQGEAKFFDANMKQEIFDHVFKENRKVTKDKLLNYLNKEFEEFRIVNLTGLDKENKVFNSSLGTYHDLRKILNKSFLDNKENEQIIEDIIQTLTLFEDREMIRQRLQKYSDIFTKAQLKKLERRHYTGWGRLSYKLINGIRDKQSNKTILGYLIDDGYSNRNFMQLINDDALSFKEEIAKAQVIGEMDGLNQVVSDIAGSPAIKKGILQSLKIVDELVKVMGHNPANIVIEMARENQTTAKGRRSSQKRYKRLEEAIKNLDHDLNHKILKEHPTDNQALQNDRLFLYYLQNGRDMYTEDPLDINRLSDYDIDHIIPQAFIKDNSIDNRVLTRSDKNRGKSDDVPSEEVVHKMKPFWSKLLSAKLITQRKFDNLTKAERGGLTDDDKAGFIKRQLVETRQITKHVARILDERFNTETDENNKKIRQVKIVTLKSNLVSNFRKEFELYKVREINDYHHAHDAYLNAVIGKALLGVYPQLEPEFVYGDYPHFHGHKENKATAKKFFYSNIMNFFKKGDVRTDKNGEIIWKKDEHISNIKKVLSYPQVNIVKKVEEQTGGFSKESILPKGNSDKLIPRKTKKFYWDTKKYGGFDSPIVAYSILVIADIEKGKSKKLKTVKALVGVTIMEKMTFERDPVAFLERKGYRNVQEENIIKLPKYSLFKLENGRKRLLASARELQKGNEIVLPNHLETLLYHAKNIHKVDEPKHLDYVDKHKDEFKELLDVVSNFSKKYTLAEGNLEKIKELYAQNNGEDLKELASSFINLLTFTAIGAPAAFKFFDKNIDRKRYTSTTEILNATLIHQSITGLYETRIDLNKLGGD

SEQ ID NO: 1224 - protein, 1359 aa, Streptococcus mutans; identical to SEQ ID NO: 1223

SEQ ID NO: 1225 - protein, 1355 aa, Streptococcus mutans
MKKPYSIGLDIGTNSVGWAVVTDDYKVPAKKMKVLGNTDKSHIKKNLLGALLFDSGNTAEDRRLKRTARRRYTRRRNRILYLQEIFAEEMSKVDDSFFHRLDESFLTDDDKNFDSHPIFGNKAEEDAYHQKFPTIYHLRKHLADSTEKADLRLVYLALAHMIKFRGHFLIEGELNAENTDVQKLFADFVGVYDRTFDDSHLSEITVDASSILTEKISKSRRLEKLINNYPKEKKNTLFGNLIALSLGLQPNFKTNFKLSEDAKLQFSKDTYEEDLEELLGKIGDDYADLFTLAKNLYDAILLSGILTADDSSTKAPLSASMIKRYAEHHEDLEKLKEFIKANKPELYHDIFKDETKNGYAGYIENGVKQDEFYKYLKNTLSKITGSDYFLDQIEREDFLRKQRTFDNGSIPHQIHLQEMHAILRRQGDYYPFLKENQDRIEKILTFRIPYYVGPLARKNSRFAWAEYHSDEAVTPWNFDQVIDKESSAQAFIEHMTNNDLYLPNEKVLPKHSPLYEKYTVYNELTKIKYVTEIGEAKFFDANLKQEIFDGLFKHERKVTKKKLRTFLDKNFDEFRIVDIQGLDKETETFNASYATYQDLLKVIKDKVFMDNPENAEILENIVLTLTLFEDREMIKQRLAKYADVFDKKVIDQLARRHYTGWGRLSAKLLNGIRDKQSCKTIMDYLIDDAQSNRNLMQLITDDNLTFKDDIVKAQYVDNSDDLHQVVQSLAGSPAIKKGILQSLKIVDELVKVMGKEPEQIVVEMARENQTTAKGRRNSQQRYKRLKEAIKSLDRDLNHKILKEHPTDNQALQNNRLFLYYLQNGRDMYTGESLDINRLSDYDIDHVIPQAFIKDNSIDNRVLTSSKANRGKSDDVPSEDVVNRMRPFWNKLLSSGLISQRKYNNLTKKELTLDDKAGFIKRQLVETRQITKHVARMLDERFNKEFDDNNKRIRRVKIVTLKSNLVSSFRKEFELYKVREINDYHHAHDAYLNAVVVKALLVKYPKLEPEFVYGEYPKYNSYRERKTATQKMFFYSNIMNMFKSKVKLADDQIVERPMIEVNDETGEIAWDKTKHITTVKKVLSYPQVNIVKKVEEQTIGQNGGLFDDNPKSPLEVIPSKLVPLKKALNPEKYGGYQKPTTAYPILLIVDTKQLIPISVMDKKRFEQNPVKFLKDKGYQQIEKNNFVKLPKYTLVDIGNGIKRLWASSKEVHKGNQLVVSKKSQDLLYHAHHLDNDYSNEYVKNHYQQFDILFNEITSFSKKCKLGKEHIQKIEEAYSKERDFASIEELADGFIKLLGFTQLGATSPFSFLGIKLNQKQYTGKKDYLLPCMEATLIHQSITGLYETRIDLSKLGGD

SEQ ID NO: 1226 - protein, 1355 aa, Streptococcus mutans; identical to SEQ ID NO: 1225

SEQ ID NO: 1227 - protein, 1345 aa, Streptococcus mutans
MKKPYSIGLDIGTNSVGWAVVTDDYKVPAKKMKVLGNTDKSHIKKNLLGALLFDSGNTAEDRRLKRTARRRYTRRRNRILYLQEIFSEEMDKVDDSFFHRLEDSFLVTEDKRGERHPIFGNLEEEVKYHENFPTIYHLRQYLADNPEKVDLRLVYLALAHIIKFRGHFLIEGKFDTRNNDVQRLFQEFLAVYDNTFENSSLQEQNVQVEEILTDKISKSAKKDRVLKLFPNEKSNGRFAEFLKLIVGNQADFKKHFELEEKAPLQFSKDTYEEELEVLLAQIGDNYAELFLSAKKLYDSILLSGILTVTDVSTKAPLSASMIQRYNEHQMDLAQLKQFIRQKLSDKYNEVFSDVSKDGYAGYIDGKTNQEAFYKYLKGLLNKIEGSGYFLDKIEREDFLRKQRTFDNGSIPHQIHLQEMRAIIRRQAEFYPFLADNQDRIEKILTFRIPYYVGPLARGKSDFAWLSRKSADKITPWNFDEIVDKESSAEAFINRMTNYDLYLPNQKVLPKHSLLYEKFTVYNELTKVKYKTEQGKTAFFDANMKQEIFDGVFKVYRKVTKDKLMDFLEKEFDEFRIVDLTGLDKENKVFNASYGTYHDLCKILDKDFLDNSKNEKILEDIVLTLTLFEDREMIRKRLENYSDLLTKEQVKKLERRHYTGWGRLSAELIHGIRNKESRKTILDYLIDDGNSNRNFMQLINDDALSFKEEIAKAQVIGETDNLNQVVSDIAGSPAIKKGILQSLKIVDELVKIMGHQPENIVVEMARENQFTKQGRRNSQQRLKGLTDSIKEFGSQILKEHPVENSQLQNDRLFLYYLQNGRDMYTGEELDIDYLSQYDIDHIIPQAFIKDNSIDNRVLTSSKENRGKSDDVPSKDVVRKMKSYWSKLLSAKLITQRKFDNLTKAERGGLTDDDKAGFIKRQLVETRQITKHVARILDERFYTETDENNKKIRQVKIVTLKSNLVSNFRKEFELYKVREINDYHHAHDAYLNAVIGKALLGVYPQLEPEFVYGDYPHFHGHKENKATAKKFFYSNIMNFFKKDDVRTDKNGEIIWKKDEHISNIKKVLSYPQVNIVKKVEEQTGGFSKESILPKGNSDKLIPRKTKKFYWDTKKYGGFDSPIVAYSILVIADIEKGKSKKLKTVKALVGVTIMEKMTFERDPVAFLERKGYRNVQEENIIKLPKYSLFKLENGRKRLLASARELQKGNEIVLPNHLGTLLYHAKNIHKVDEPKHLDYVDKHKDEFKELLDVVSNFSKKYTLAEGNLEKIKELYAQNNGEDLKELASSFINLLTFTAIGAPATFKFFDKNIDRKRYTSTTEILNATLIHQSITGLYETRIDLSKLGGD

SEQ ID NO: 1228 - protein, 1345 aa, Streptococcus mutans; identical to SEQ ID NO: 1227

SEQ ID NO: 1229 - protein, 1345 aa, Streptococcus mutans
MKKPYSIGLDIGTNSVGWAVVTDDYKVPAKKMKVLGNTDKSHIKKNLLGALLFDSGNTAEDRRLKRTARRRYTRRRNRILYLQEIFSEEMGKVDDSFFHRLDESFLTDDDKNFDSHPIFGNKAEEDAYHQKFPTIYHLRKHLADSTEKADLRLVYLALAHMIKFRGHFLIEGELNAENTDVQKLFADFVGVYDRTFDDSHLSEITVDASSILTEKISKSRRLEKLINNYPKEKKNTLFGNLIALSLGLQPNFKTNFKLSEDAKLQFSKDTYEEELEVLLAQIGDNYAELFLSAKKLYDSILLSGILTVTDVSTKAPLSASMIQRYNEHQMDLAQLKQFIRQKLSDKYNEVFSDVSKDGYAGYIDGKTNQEAFYKYLKGLLNKIEGSGYFLDKIEREDFLRKQRTFDNGSIPHQIHLQEMRAIIRRQAEFYPFLADNQDRIEKILTFRIPYYVGPLARGKSDFAWLSRKSADKITPWNFDEIVDKESSVEAFINRMTNYDLYLPNQKVLPKHSLLYEKFTVYNELTKVKYKTEQGKTAFFDANMKQEIFDGVFKVYRKVTKDKLMDFLEKEFDEFRIVDLTGLDKENKAFNASYGTYHDLRKILDKDFLDNSKNEKILEDIVLTLTLFEDREMIRKRLKNYSDLLTKEQLKKLERRHYTGWGRLSAELIHGIRNKESRKTILDYLIDDGNSNRNFMQLINDDALSFKEEIAKAQVIGETDNLNQVVSDIAGSPAIKKGILQSLKIVDELVKIMGHQPENIVVEMARENQFTNQGRRNSQQRLKGLTDSIKEFGSQILKEHPVENSQLQNDRLFLYYLQNGRDMYTGEELDIDYLSQYDIDHIIPQAFIKDNSIDNRVLTSSKENRGKSDDVPSKDVVRKMKSYWSKLLSAKLITQRKFDNLTKGERGGLTDDDKAGFIKRQLVETRQITKHVARILDERFNTETDENNKKIRQVKIVTLKSNLVSNFRKEFELYKVREINDYHHAHDAYLNAVIGKALLGVYPQLEPEFVYGDYPHFHGHKENKATAKKFFYSNIMNFFKKDDVRTDKNGEIIWKKDEYISNIKKVLSYPQVNIVKKVEEQTGGFSKESILPKGDSDKLIPRKTKKFYWDTKKYGGFDSPIVAYSILVIADIEKGKSKKLKTVKALVGVTIMEKMTFERDPVAFLERKGYRNVQEENIIKLPKYSLFKLENGRKRLLASARELQKGNEIVLPNHLGTLLYHAKNIHKVDEPKHLDYVDKHKDEFKELLDVVSNFSKKYTLAEGNLEKIKELYAQNNGEDLKELASSFINLLTFTAIGAPATFKFFDKNIDRKRYTSTTEILNATLIHQSITGLYETRIDLSKLGGD

SEQ ID NO: 1230 - protein, 1345 aa, Streptococcus mutans
MKKPYSIGLDIGTNSVGWAVVTDDYKVPAKKMKVLGNTDKSHIKKNLLGALLFDSGNTAEDRRLKRTARRRYTRRRNRILYLQEIFSEEMGKVDDSFFHRLDESFLTDDDKNFDSYPIFGNKAEEDAYHQKFPTIYHLRKHLADSTEKADLRLVYLALAHMIKFRGHFLIEGELNAENTDVQKLFADFVGVYDRTFDDSHLSEITVDASSILTEKISKSRRLEKLINNYPKEKKNTLFRNLVALSLGLQPNFKTNFKLSEDAKLQFSKDTYEEDLEELLGKIGDDYADLFTLAKNLYDAILLSGILTADDSSTKAPLSASMIKRYAEHHEDLEKLKEFIKANKPELYHDIFKDETKNGYAGYIENGVKQDEFYKYLKNTLSKIAGSDYFLDKIEREDFLRKQRTFDNGSIPHQIHLQEMHAILRRQGDYYPFLKENQDRIEKILTFRIPYYVGPLARGKSDFAWLSRKSADKITPWNFDEIVDKESSVEAFINRMTNYDLYLPNQKVLPKHSLLYEKFTVYNELTKVKYKTEQGKTAFFDANMKQEIFDGVFKVYRKVTKDKLMDFLEKEFDEFRIVDLTGLDKENKAFNASYGTYHDLRKILDKDFLDNSKNEKILEDIVLTLTLFEDREMIRKRLKNYSDLLTKEQLKKLERRHYTGWGRLSAELIHGIRNKESRKTILDYLIDDGNSNRNFMQLINDDALSFKEEIAKAQVIGETDNLNQVVSDIAGSPAIKKGILQSLKIVDELVKIMGHQPENIVVEMARENQFTNQGRRNSQQRLKGLTDSIKEFGSQILKEHPVENSQLQNDRLFLYYLQNGRDMYTGEELDIDYLSQYDIDHIIPQAFIKDNSIDNRVLTSSKENRGKSDDVPSKDVVRKMKSYWSKLLSAKLITQRKFDNLTKGERGGLTDDDKAGFIKRQLVETRQITKHVARILDERFNTETDENNKKIRQVKIVTLKSNLVSNFRKEFELYKVREINDYHHAHDAYLNAVIGKALLGVYPQLEPEFVYGDYPHFHGHKENKATAKKFFYSNIMNFFKKDDVRTDKNGEIIWKKDEYISNIKKVLSYPQVNIVKKVEEQTGGFSKESILPKGDSDKLIPRKTKKFYWDTKKYGGFDSPIVAYSILVIADIEKGKSKKLKTVKALVGVTIMEKMTFERDPVAFLERKGYRNVQEENIIKLPKYSLFKLENGRKRLLASARELQKGNEIVLPNHLGTLLYHAKNIHKVDEPKHLDYVDKHKDEFKELLDVVSNFSKKYTLAEGNLEKIKELYAQNNGEDLKELASSFINLLTFTAIGAPATFKFFDKNIDRKRYTSTTEILNATLIHQSITGLYETRIDLSKLGGD

SEQ ID NO: 1231 - protein, 1345 aa, Streptococcus mutans; identical to SEQ ID NO: 1230

SEQ ID NO: 1232 - protein, 1345 aa, Streptococcus mutans
MKKPYSIGLDIGTNSVGWAVVTDDYKVPAKKMKVLGNTDKSHIKKNLLGALLFDSGNTAEDRRLKRTARRRYTRRRNRILYLQEIFSEEMGKVDDSFFHRLEDSFLVTEDKRGERHPIFGNLEEEVKYHENFPTIYHLRQYLADNPEKTDLRLVYLALAHIIKFGGHFLIEGKFDTRNNDVQRLFQEFLAVYDNTFENSSLQEQNVQVEEILTDKISKSAKKDRVLKLFPNEKSNGRFAEFLKLIVGNQADFKKHFELEEKAPLQFSKDIYEEELEVLLAQIGDNYAELFLSAKKLYDSILLSGILTVTDVSTKAPLSASMIQRYNEHQMDLAQLKQFIRQKLSDKYNEVFSDVSKDGYAGYIDGKTNQEAFYKYLKGLLNKIEGSGYFLDKIEREDFLRKQRTFDNGSIPHQIHLQEMRAIIRRQAEFYPFLADNQDRIEKILTFRIPYYVGPLARGKSDFAWLSRKSADKITPWNFDEIVDKESSVEAFINRMTNYDLYLPNQKVLPKHSLLYEKFTVYNELTKVKYKTEQGKTAFFDANMKQEIFDGVFKVYRKVTKDKLMDFLEKEFDEFRIVDLTGLDKENKAFNASYGTYHDLRKILDKDFLDNSKNEKILEDIVLTLTLFEDREMIRKRLKNYSDLLTKEQLKKLERRHYTGWGRLSAELIHGIRNKESRKTILDYLIDDGNSNRNFMQLINDDALSFKEEIAKAQVIGETDNLNQVVSDIAGSPAIKKGILQSLKIVDELVKIMGHQPENIVVEMARENQFTNQGRRNSQQRLKGLTDSIKEFGSQILKEHPVENSQLQNDRLFLYYLQNGRDMYTGEELDIDYLSQYDIDHIIPQAFIKDNSIDNRVLTSSKENRGKSDDVPSKNVVRKMKSYWSKLLSAKLITQRKFDNLTKAERGGLTDDDKAGFIKRQLVETRQITKHVARILDERFHTETDENNKKIRQVKIVTLKSNLVSNFRKEFELYKVREINDYHHAHDAYLNAVIGKALLGVYPQLEPEFVYGDYPHFHGHKENKATAKKFFYSNIMNFFKKDDVRTDKNGEIIWKKDEHISNIKKVLSYPQVNIVKKVEEQTGGFSKESILPKGNSDKLIPRKTKKFYWDTKKYGGFDSPIVAYSILVIADIEKGKSKKLKTVKALVGVTIMEKMTFERDPVAFLERKGYRNVQEENIIKLPKYSLFKLENGRKRLLASARELQKGNEIVLPNHLGTLLYHAKNIHKVDEPKHLDYVDKHKDEFKELLDVVSNFSKKYTLAEGNLEKIKELYAQNNGEDLKELASSFINLLTFTAIGAPATFKFFDKNIDRKRYTSTTEILNATLIHQSITGLYETRIDLSKLGGD

SEQ ID NO: 1233 - protein, 1345 aa, Streptococcus mutans; identical to SEQ ID NO: 1232

SEQ ID NO: 1234 - protein, 1345 aa, Streptococcus mutans
MKKPYSIGLDIGTNSVGWAVVTDDYKVPAKKMKVLGNTDKSHIKKNLLGALLFDSGNTAEDRRLKRTARRRYTRRRNRILYLQEIFSEEMGKVDDSFFHRLEDSFLVTEDKRGERHPIFGNLEEEVKYHENFPTIYHLRQYLADNPEKTDLRLVYLALAHIIKFRGHFLIEGKFDTRNNDVQRLFQEFLAVYDNTFENSSLQEQNVQVEEILTDKISKSAKKDRVLKLFPNEKSNGRFAEFLKLIVGNQADFKKHFELEEKAPLQFSKDIYEEELEVLLAQIGDNYAELFLSAKKLYDSILLSGILTVTDVSTKAPLSASMIQRYNEHQMDLAQLKQFIRQKLSDKYNEVFSDVSKDGYAGYIDGKTNQEAFYKYLKGLLNKIEGSGYFLDKIEREDFLRKQRTFDNGSIPHQIHLQEMRAIIRRQAEFYPFLADNQDRIEKILTFRIPYYVGPLARGKSDFAWLSRKSADKITPWNFDEIVDKESSVEAFINRMTNYDLYLPNQKVLPKHSLLYEKFTVYNELTKVKYKTEQGKTAFFDANMKQEIFDGVFKVYRKVTKDKLMDFLEKEFDEFRIVDLTGLDKENKAFNASYGTYHDLRKILDKDFLDNSKNEKILEDIVLTLTLFEDREMIRKRLKNYSDLLTKEQLKKLERRHYTGWGRLSAELIHGIRNKESRKTILDYLIDDGNSNRNFMQLINDDALSFKEEIAKAQVIGETDNLNQVVSDIAGSPAIKKGILQSLKIVDELVKIMGHQPENIVVEMARENQFTNQGRRNSQQRLKGLTDSIKEFGSQILKEHPVENSQLQNDRLFLYYLQNGRDMYTGEELDIDYLSQYDIDHIIPQAFIKDNSIDNRVLTSSKENRGKSDDVPSKNVVRKMKSYWSKLLSAKLITQRKFDNLTKAERGGLTDDDKAGFIKRQLVETRQITKHVARILDERFHTETDENNKKIRQVKIVTLKSNLVSNFRKEFELYKVREINDYHHAHDAYLNAVIGKALLGVYPQLEPEFVYGDYPHFHGHKENKATAKKFFYSNIMNFFKKDDVRTDKNGEIIWKKDEHISNIKKVLSYPQVNIVKKVEEQTGGFSKESILPKGNSDKLIPRKTKKFYWDTKKYGGFDSPIVAYSILVIADIEKGKSKKLKTVKALVGVTIMEKMTFERDPVAFLERKGYRNVQEENIIKLPKYSLFKLENGRKRLLASARELQKGNEIVLPNHLGTLLYHAKNIHKVDEPKHLDYVDKHKDEFKELLDVVSNFSKKYTLAEGNLEKIKELYAQNNGEDLKELASSFINLLTFTAIGAPATFKFFDKNIDRKRYTSTTEILNATLIHQSITGLYETRIDLSKLGGD

SEQ ID NO: 1235 - protein, 1345 aa, Streptococcus mutans
MKKPYSIGLDIGTNSVGWAVVTDDYKVPAKKMKVLGNTDKSHIKKNLLGALLFDSGNTAEDRRLKRTARRRYTRRRNRILYLQEIFSEEMGKVDDSFFHRLEDSFLVTEDKRGERHPIFGNLEEEVKYHENFPTIYHLRQYLADNPEKTDLRLVYLALAHIIKFRGHFLIEGKFDTRNNDVQRLFQEFLAVYDNTFENSSLQEQNVQVEEILTDKISKSAKKDRVLKLFPNEKSNGRFAEFLKLIVGNQADFKKHFELEEKAPLQFSKDIYEEELEVLLAQIGDNYAELFLSAKKLYDSILLSGILTVTDVSTKAPLSASMIQRYNEHQMDLAQLKQFIRQKLSDKYNEVFSDVSKDGYAGYIDGKTNQEAFYKYLKGLLNKIEGSGYFLDKIEREDFLRKQRTFDNGSIPHQIHLQEMRAIIRRQAEFYPFLADNQDRIEKILTFRIPYYVGPLARGKSDFAWLSRKSADKITPWNFDEIVDKESSVEAFINRMTNYDLYLPNQKVLPKHSLLYEKFTVYNELTKVKYKTEQGKTAFFDANMKQEIFDGVFKVYRKVTKDKLMDFLEKEFDEFRIVDLTGLDKENKAFNASYGTYHDLRKILDKDFLDNSKNEKILEDIVLTLTLFEDREMIRKRLKNYSDLLTKEQLKKLERRHYTGWGRLSAELIHGIRNKESRKTILDYLIDDGNSNRNFMQLINDDALSFKEEIAKAQVIGETDNLNQVVSDIAGSPAIKKGILQSLKIVDELVKIMGHQPENIVVEMARENQFTNQGRRNSQQRLKGLTDSIKEFGSQILKEHPVENSQLQNDRLFLYYLQNGRDMYTGEELDIDYLSQYDIDHIIPQAFIKDNSIDNRVLTSSKENRGKSDDVPSKDVVRKMKSYWSKLLSAKLITQRKFDNLTKAERGGLTDDDKAGFIKRQLVETRQITKHVARILDERFNTETDENNKKIRQVKIVTLKSNLVSNFRKEFELYKVREINDYHHAHDAYLNAVIGKALLGVYPQLEPEFVYGDYPHFHGHKENKATAKKFFYSNIMNFFKKDDVRTDKNGEIIWKKDEHISNIKKVLSYPQVNIVKKVEEQTGGFSKESILPKGNSYKLIPRKTKKFYWDTKKYGGFDSPIVAYSILVIADIEKGKSKKLKTVKALVGVTIMEKMTFERDPVAFLERKGYRNVQEENIIKLPKYSLFKLENGRKRLLASARELQKGNEIVLPNHLGTLLYHAKNIHKVDEPKHLDYVDKHKDEFKELLDVVSNFSKKYTLAEGNLEKIKELYAQNNGEDLKELASSFINLLTFTAIGAPAAFKFFDKNIDRKRYTSTTEILNATLIHQSITGLYETRIDLSKLGGD

SEQ ID NO: 1236 - protein, 1345 aa, Streptococcus mutans
MKKPYSIGLDIGTNSVGWAVVTDDYKVPAKKMKVLGNTDKSHIKKNLLGALLFDSGNTAEDRRLKRTARRRYTRRRNRILYLQEIFSEEMGKVDDSFFHRLEDSFLVTEDKRGERHPIFGNLEEEVKYHENFPTIYHLRQYLADNPEKTDLRLVYLALAHIIKFRGHFLIEGKFDTRNNDVQRLFQEFLAVYDNTFENSSLQEQNVQVEEILTDKISKSAKKDRVLKLFPNEKSNGRFAEFLKLIVGNQADFKKHFELEEKAPLQFSKDIYEEELEVLLAQIGDNYAELFLSAKKLYDSILLSGILTVTDVSTKAPLSASMIQRYNEHQMDLAQLKQFIRQKLSDKYNEVFSDVSKDGYAGYIDGKTNQEAFYKYLKGLLNKIEGSGYFLDKIEREDFLRKQRTFDNGSIPHQIHLQEMRAIIRRQAEFYPFLADNQDRIEKILTFRIPYYVGPLARGKSDFAWLSRKSADKITPWNFDEIVDKESSAEAFINRMTNYDLYLPNQKVLPKHSLLYEKFTVYNELTKVKYKTEQGKTAFFDANMKQEIFDGVFKVYRKVTKDKLMDFLEKEFDEFRIVDLTGLDKENKAFNASYGTYHDLRKILDKDFLDNSKNEKILEDIVLTLTLFEDREMIRKRLKNYSDLLTKEQLKKLERRHYTGWGRLSAELIHGIRNKESRKTILDYLIDDGNSNRNFMQLINDDALSFKEEIAKAQVIGETDNLNQVVSDIAGSLAIKKGILQSLKIVDELVKIMGHQPENIVVEMARENQFTNQGRRNSQQRLKGLTDSIKEFGSQILKEHPVENSQLQNDRLFLYYLQNGRDMYTGEELDIDYLSQYDIDHIIPQAFIKDNSIDNRVLTSSKENRGKSDDVPSKDVVRKMKSYWSKLLSAKLITQRKFDNLTKGERGGLTDDDKAGFIKRQLVETRQITKHVARILDERFNTETDENNKKIRQVKIVTLKSNLVSNFRKEFELYKVREINDYHHAHDAYLNAVIGKALLGVYPQLEPEFVYGDYPHFHGHKENKATAKKFFYSNIMNFFKKDDVRTDKNGEIIWKKDEYISNIKKVLSYPQVNIVKKVEEQTGGFFKESILPKGDSDKLIPRKTKKFYWDTKKYGGFDSPIVAYSILVIADIEKGKSKKLKTVKALVGVTIMEKMTFERDPVAFLERKGYRNVQEENIIKLPKYSLFKLENGRKRLLASARELQKGNEIVLPNHLGTLLYHAKNIHKVDEPKHLDYVDKHKDEFKELLDVVSNFSKKYTLAEGNLEKIKELYAQNNGEDLKELASSFINLLTFTAIGAPATFKFFDKNIDRKRYTSTTEILNATLIHQSITGLYETRIDLSKLGGD

SEQ ID NO: 1237 - protein, 1345 aa, Streptococcus mutans
MKKPYSIGLDIGTNSVGWAVVTDDYKVPAKKMKVLGNTDKSHIKKNLLGALLFDSGNTAEDRRLKRTARRRYTRRRNRILYLQEIFSEEMGKVDDSFFHRLEDSFLVTEDKRGERHPIFGNLEEEVKYHENFPTIYHLRQYLADNPEKTDLRLVYLALAHIIKFRGHFLIEGKFDTRNNDVQRLFQEFLAVYDNTFENSSLQEQNVQVEEILTDKISKSAKKDRVLKLFPNEKSNGRFAEFLKLIVGNQADFKKHFELEEKAPLQFSKDIYEEELEVLLAQIGDNYAELFLSAKKLYDSILLSGILTVTDVSTKAPLSASMIQRYNEHQMDLAQLKQFIRQKLSDKYNEVFSDVSKDGYAGYIDGKTNQEAFYKYLKGLLNKIEGSGYFLDKIEREDFLRKQRTFDNGSIPHQIHLQEMRAIIRRQAEFYPFLADNQDRIEKILTFRIPYYVGPLARGKSDFAWLSRKSADKITPWNFDEIVDKESSVEAFINRMTNYDLYLPNQKVLPKHSLLYEKFTVYNELTKVKYKTEQGKTAFFDANMKQEIFDGVFKVYRKVTKDKLMDFLEKEFDEFRIVDLTGLDKENKAFNASYGTYHDLRKILDKDFLDNSKNEKILEDIVLTLTLFEDREMIRKRLKNYSDLLTKEQLKKLERRHYTGWGRLSAELIHGIRNKESRKTILDYLIDDGNSNRNFMQLINDDALSFKEEIAKAQVIGETDNLNQVVSDIAGSPAIKKGILQSLKIVDELVKIMGHQPENIVVEMARENQFTNQGRRNSQQRLKGLTDSIKEFGSQILKEHPVENSQLQNDRLFLYYLQNGRDMYTGEELDIDYLSQYDIDHIIPQAFIKDNSIDNRVLTSSKENRGKSDDVPSKDVVRKMKSYWSKLLSAKLITQRKFDNLTKAERGGLTDDDKAGFIKRQLVETRQITKHVARILDERFNTETDENNKKIRQVKIVTLKSNLVSNFRKEFELYKVREINDYHHAHDAYLNAVIGKALLGVYPQLEPEFVYGDYPHFHGHKENKATAKKFFYSNIMNFFKKDDVRTDKNGEIIWKKDEHISNIKKVLSYPQVNIVKKVEEQTGGFSKESILPKGNSDKLIPRKTKKFYWDTKKYGGFDSPIVAYSILVIADIEKGKSKKLKTVKALVGVTIMEKMTFERDPVAFLERKGYRNVQEENIIKLPKYSLFKLENGRKRLLASARELQKGNEIVLPNHLGTLLYHAKNIHKVDEPKHLDYVDKHKDEFKELLDVVSNFSKKYTLAEGNLEKIKELYAQNNGEDLKELASSFINLLTFTAIGAPATFKFFDKNIDRKRYTSTTEILNATLIHQSITGLYETRIDLNKLGGD

SEQ ID NO: 1238 - protein, 1345 aa, Streptococcus mutans; identical to SEQ ID NO: 1237

SEQ ID NO: 1239 - protein, 1345 aa, Streptococcus mutans; identical to SEQ ID NO: 1234

SEQ ID NO: 1240 - protein, 1345 aa, Streptococcus mutans; identical to SEQ ID NO: 1235

SEQ ID NO: 1241 - protein, 1345 aa, Streptococcus mutans; identical to SEQ ID NO: 1236

SEQ ID NO: 1242 - protein, 1345 aa, Streptococcus mutans
MKKPYSIGLDIGTNSVGWAVVTDDYKVPAKKMKVLGNTDKSHIKKNLLGALLFDSGNTAEDRRLKRTARRRYTRRRNRILYLQEIFSEEMGKVDDSFFHRLEDSFLVTEDKRGERHPIFGNLEEEVKYHENFPTIYHLRQYLADNPEKVDLRLVYLALAHIIKFRGHFLIEGKFDTRNNDVQKLFQEFLAVYDNTFENSSLQEQNVQVEEILTDKISKSAKKDRVLKLFPNEKSNGRFAEFLKLIVGNQADFKKHFELEEKAPLQLSKDTYEEELEVLLAQIGDNYAELFLSAKKLYDSILLSGILTVTDVSTKAPLSASMIQRYNEHQMDLAQLKQFIRQKLSDKYNEVFSDVSKDGYAGYIDGKTNQEAFYKYLKGLLNKIEGSGYFLDKIEREDFLRKQRTFDNGSIPHQIHLQEMRAIIRRQAEFYPFLADNQDRIEKILTFRIPYYVGPLARGKSDFAWLSRKSADKITPWNFDEIVDKESSVEAFINRMTNYDLYLPNQKVLPKHSLLYEKFTVYNELTKVKYKTEQGKTAFFDANMKQEIFDGVFKVYRKVTKDKLMDFLEKEFDEFRIVDLTGLDKENKAFNASYGTYHDLRKILDKDFLDNSKNEKILEDIVLTLTLFEDREMIRKRLENYSDLLTKEQVKKLERRHYTGWGRLSAELIHGIRNKESRKTLLDYLIDDGNSNRNFMQLINDDALSFKEEIAKAQVIGETDNLNQVVSDIAGSPAIKKGILQSLKIVDELVKIMGHQPENIVVEMARENQFTNQGRRNSQQRLKGLTDSIKEFGSQILKEHPVENSQLQNDRLFLYYLQNGRDMYTGEELDIDYLSQYDIDHIIPQAFIKDNSIDNRVLTSSKENRGKSDDVPSKDVVRKMKSYWSKLLSAKLITQRKFDNLTKAERGGLTDDDKAGFIKRQLVETRQITKHVARILDERFNTETDENNKKIRQVKIVTLKSNLVSNFRKEFELYKVREINDYHHAHDAYLNAVIGKALLGVYPQLEPEFVYGDYPHFHGHKENKATAKKFFYSNIMNFFKKDDVRTDKNGEIIWKKDEYISNIKKVLSYPQVNIVKKVEEQTGGFSKESILPKGNSDKLIPRKTKKFYWDTKKYGGFDSPIVAYSILVIADIEKGKSKKLKTVKALVGVTIMEKMTFERDPIAFLERKGYRNVQEENIIKLPKYSLFKLENGRKRLLASARELQKGNEIVLPNHLGTLLYHAKNIHKVDEPKHLDYVDKHKDEFKELLDVVSNFSKKYTLAEGNLEKIKELYAQNNGEDLKELASSFINLLTFTAIGAPATFKFFDKNIDRKRYTSTTEILNATLIHQSITGLYETRIDLSKLGGD

SEQ ID NO: 1243 - protein, 1345 aa, Streptococcus mutans; identical to SEQ ID NO: 1242

SEQ ID NO: 1244 - protein, 1345 aa, Streptococcus mutans
MKKPYSIGLDIGTNSVGWAVVTDDYKVPAKKMKVLGNTDKSHIKKNLLGALLFDSGNTAEDRRLKRTARRRYTRRRNRILYLQEIFSEEMGKVDDSFFHRLEDSFLVTEDKRGERHPIFGNLEEEVKYHENFPTIYHLRQYLADNPEKVDLRLVYLALAHIIKFRGHFLIEGKFDTRNNDVQRLFQEFLAVYDNTFENSSLQEQNVQVEEILTDKISKSAKKDRVLKLFPNEKSNGRFAEFLKLIVGNQADFKKHFELEEKAPLQFSKDTYEEDLEELLGKIGDDYADLFTLAKNLYDAILLSGILTADDSSTKAPLSASMIQRYNEHQMDLAQLKQFIRQKLSDKYNEVFSDVSKDGYAGYIDGKTNQEAFYKYLKGLLNKIEGSGYFLDKIEREDFLRKQRTFDNGSIPHQIHLQEMRAIIRRQAEFYPFLADNQDRIEKILTFRIPYYVGPLARGKSDFAWLSRKSADKITPWNFDEIVDKESSAEAFINRMTNYDLYLPNQKVLPKHSLLYEKFTVYNELTKVKYKTEQGKTAFFDANMKQEIFDGVFKVYRKVTKDKLMDFLEKEFDEFRIVDLTGLDKENKVFNASYGTYHDLCKILDKDFLDNSKNEKILEDIVLTLTLFEDREMIRKRLENYSDLLTKEQVKKLERRHYTGWGRLSAELIHGIRNKESRKTILDYLIDDGNSNRNFMQLINDDALSFKEEIAKAQVIGETDNLNQVVSDIAGSPAIKKGILQSLKIVDELVKIMGHQPENIVVEMARENQFTNQGRRNSQQRLKGLTDSIKEFGSQILKEHPVENSQLQNDRLFLYYLQNGRDMYTGEELDIDYLSQYDIDHIIPQAFIKDNSIDNRVLTSSKENRGKSDDVPSKDVVRKMKSYWSKLLSAKLITQRKFDNLTKAERGGLTDDDKAGFIKRQLVETRQITKHVARILDERFYTETDENNKKIRQVKIVTLKSNLVSNFRKEFELYKVREINDYHHAHDAYLNAVIGKALLGVYPQLEPEFVYGDYPHFHGHKENKATAKKFFYSNIMNFFKKDDVRTDKNGEIIWKKDEHISNIKKVLSYPQVNIVKKVEEQTGGFSKESILPKGNSDKLIPRKTKKFYWDTKKYGGFDSPIVAYSILVIADIEKGKSKKLKTVKALVGVTIMEKMTFERDPVAFLERKGYRNVQEENIIKLPKYSLFKLENGRKRLLASARELQKGNEIVLPNHLGTLLYHAKNIHKVDEPKHLDYVDKHKDEFKELLDVVSNFSKKYTLAEGNLEKIKELYAQNNGEDLKELASSFINLLTFTAIGAPATFKFFDKNIDRKRYTSTTEILNATLIHQSITGLYETRIDLSKLGGD

SEQ ID NO: 1245 - protein, 1345 aa, Streptococcus mutans
MKKPYSIGLDIGTNSVGWAVVTDDYKVPAKKMKVLGNTDKSHIKKNLLGALLFDSGNTAEDRRLKRTARRRYTRRRNRILYLQEIFSEEMGKVDDSFFHRLEDSFLVTEDKRGERHPIFGNLEEEVKYHENFPTIYHLRQYLADNPEKVDLRLVYLALAHIIKFRGHFLIEGKFDTRNNDVQRLFQEFLAVYDNTFENSSLQEQNVQVEEILTDKISKSAKKDRVLKLFPNEKSNGRFAEFLKLIVGNQADFKKHFELEEKAPLQFSKDTYEEDLEELLGKIGDDYADLFTLAKNLYDAILLSGILTADDSSTKAPLSASMIQRYNEHQMDLAQLKQFIRQKLSDKYNEVFSDVSKDGYAGYIDGKTNQEAFYKYLKGLLNKIEGSGYFLDKIEREDFLRKQRTFDNGSIPHQIHLQEMRAIIRRQAEFYPFLADNQDRIEKILTFRIPYYVGPLARGKSDFAWLSRKSADKITPWNFDEIVDKESSAEAFINRMTNYDLYLPNQKVLPKHSLLYEKFTVYNELTKVKYKTEQGKTAFFDANMKQEIFDGVFKVYRKVTKDKLMDFLEKEFDEFRIVDLTGLDKENKVFNASYGTYHDLCKILDKDFLDNSKNEKILEDIVLTLTLFEDREMIRKRLENYSDLLTKEQVKKLERRHYTGWGRLSAELIHGIRNKESRKTILDYLIDDGNSNRNFMQLINDDALSFKEEIAKAQVIGETDNLNQVVSDIAGSPAIKKGILQSLKIVDELVKIMGHQPENIVVEMARENQFTNQGRRNSQQRLKGLTDSIKEFGSQILKEHPVENSQLQNDRLFLYYLQNGRDMYTGEELDIDYLSQYDIDHIIPQAFIKDNSIDNRVLTSSKENRGKSDDVPSKDVVRKMKPYWSKLLSAKLITQRKFDNLTKAERGGLTDDDKAGFIKRQLVETRQITKHVARILDERFNTETDENNKKIRQVKIVTLKSNLVSNFRKEFELYKVREINDYHHAHDAYLNAVIGKALLGVYPQLEPEFVYGDYPHFHGHEENKATAKKFFYSNIMNFFKKDDVRTDKNGEIIWKKDEHISNIKKVLSYPQVNIVKKVEEQTGGFSKESILPKGNSDKLIPRKTKKFYWDTKKYGGFDSPIVAYSILVIADIEKGKSKKLKTVKALVGVTIMEKMTFERDPVAFLERKGYRNVQEENIIKLPKYSLFKLENGRKRLLASARELQKGNEIVLPNHLGTLLYHAKNIHKVDEPKHLDYVDKHKDEFKELLDVVSNFSKKYTLAEGNLEKIKELYAQNNGEDLKELASSFINLLTFTAIGAPATFKFFDKNIDRKRYTSTTEILNATLIHQSITGLYETRIDLSKLGGD

SEQ ID NO: 1246 - protein, 1345 aa, Streptococcus mutans
MKKPYSIGLDIGTNSVGWAVVTDDYKVPAKKMKVLGNTDKSHIKKNLLGALLFDSGNTAEDRRLKRTARRRYTRRRNRILYLQEIFSEEMGKVDDSFFHRLEDSFLVTEDKRGERHPIFGNLEEEVKYHENFPTIYHLRQYLADNPEKVDLRLVYLALAHIIKFRGHFLIEGKFDTRNNDVQRLFQEFLAVYDNTFENSSLQEQNVQVEEILTDKISKSAKKDRVLKLFPNEKSNGRFAEFLKLIVGNQADFKKHFELEEKAPLQFSKDTYEEELEVLLAQIGDNYAELFLSAKKLYDSILLSGILTVTDVSTKAPLSASMIQRYNEHQMDLAQLKQFIRQKLSDKYNEVFSDVSKDGYAGYIDGKTNQEAFYKYLKGLLNKIEGSGYFLDKIEREDFLRKQRTFDNGSIPHQIHLQEMRAIIRRQAEFYPFLADNQDRIEKILTFRIPYYVGPLARGKSDFAWLSRKSADKITPWNFDEIVDKESSAEAFINRMTNYDLYLPNQKVLPKHSLLYEKFTVYNELTKVKYKTEQGKTAFFDANMKQEIFDGVFKVYRKVTKDKLMDFLEKEFDEFRIVDLTGLDKENKVFNASYGTYHDLCKILDKDFLDNSKNEKILEDIVLTLTLFEDREMIRKRLENYSDLLTKEQVKKLERRHYTGWGRLSAELIHGIRNKESRKTILDYLIDDGNSNRNFMQLINDDALSFKEEIAKAQVIGETDNLNQVVSDIAGSPAIKKGILQSLKIVDELVKIMGHQPENIVVEMARENQFTKQGRRNSQQRLKGLTDSIKEFGSQILKEHPVENSQLQNDRLFLYYLQNGRDMYTGEELDIDYLSQYDIDHIIPQAFIKDNSIDNRVLTSSKENRGKSDDVPSKDVVRKMKSYWSKLLSAKLITQRKFDNLTKAERGGLTDDDKAGFIKRQLVETRQITKHVARILDERFYTETDENNKKIRQVKIVTLKSNLVSNFRKEFELYKVREINDYHHAHDAYLNAVIGKALLGVYPQLEPEFVYGDYPHFHGHKENKATAKKFFYSNIMNFFKKDDVRTDKNGEIIWKKDEHISNIKKVLSYPQVNIVKKVEEQTGGFSKESILPKGNSDKLIPRKTKKFYWDTKKYGGFDSPIVAYSILVIADIEKGKSKKLKTVKALVGVTIMEKMTFERDPVAFLERKGYRNVQEENIIKLPKYSLFKLENGRKRLLASARELQKGNEIVLPNHLGTLLYHAKNIHKVDEPKHLDYVDKHKDEFKELLDVVSNFSKKYTLAEGNLEKIKELYAQNNGEDLKELASSFINLLTFTAIGAPATFKFFDKNIDRKRYTSTTEILNATLIHQSITGLYETRIDLSKLGGD

SEQ ID NO: 1247 - protein, 1345 aa, Streptococcus mutans
MKKPYSIGLDIGTNSVGWAVVTDDYKVPAKKMKVLGNTDKSHIKKNLLGALLFDSGNTAEDRRLKRTARRRYTRRRNRILYLQEIFSEEMGKVDDSFFHRLEDSFLVTEDKRGERHPIFGNLEEEVKYHENFPTIYHLRQYLADNPEKVDLRLVYLALAHIIKFRGHFLIEGKFDTRNNDVQRLFQEFLAVYDNTFENSSLQEQNVQVEEILTDKISKSAKKDRVLKLFPNEKSNGRFAEFLKLIVGNQADFKKHFELEEKAPLQFSKDTYEEELEVLLAQIGDNYAELFLSAKKLYDSILLSGILTVTDVSTKAPLSASMIQRYNEHQMDLAQLKQFIRQKLSDKYNEVFSDVSKDGYAGYIDGKTNQEAFYKYLKGLLNKIEGSGYFLDKIEREDFLRKQRTFDNGSIPHQIHLQEMRAIIRRQAEFYPFLADNQDRIEKILTFRIPYYVGPLARGKSDFAWLSRKSADKITPWNFDEIVDKESSAEAFINRMTNYDLYLPNQKVLPKHSLLYEKFTVYNELTKVKYKTEQGKTAFFDANMKQEIFDGVFKVYRKVTKDKLMDFLEKEFDEFRIVDLTGLDKENKVFNASYGTYHDLCKILDKDFLDNSKNEKILEDIVLTLTLFEDREMIRKRLENYSDLLTKEQVKKLERRHYTGWGRLSAELIHGIRNKESRKTILDYLIDDGNSNRNFMQLINDDALSFKEEIAKAQVIGETDNLNQVVSDIAGSPAIKKGILQSLKIVDELVKIMGHQPENIVVEMARENQFTKQGRRNSQQRLKGLTDSIKEFGSQILKEHPVENSQLQNDRLFLYYLQNGRDMYTGEELDIDYLSQYDIDHIIPQAFIKDNSIDNRVLTSSKENRGKSDDVPSKDVVRKMKSYWSKLLSAKLITQRKFDNLTKAERGGLTDDDKAGFIKRQLVETRQITKHVARILDERFYTETDENNKKIRQVKIVTLKSNLVSNFRKEFELYKVREINDYHHAHDAYLNAVIGKALLGVYPQLEPEFVYGDYPHFHGHKENKATAKKFFYSNIMNFFKKDDVRTDRNGEIIWKKDEHISNIKKVLSYPQVNIVKKVEEQTGGFSKESILPKGNSDKLIPRKTKKFYWDTKKYGGFDSPIVAYSILVIADIEKGKSKKLKTVKALVGVTIMEKMTFERDPVAFLERKGYRNVQEENIIKLPKYSLFKLENGRKRLLASARELQKGNEIVLPNHLGTLLYHAKNIHKVDEPKHLDYVDKHKDEFKELLDVVSNFSKKYTLAEGNLEKIKELYAQNNGEDLKELASSFINLLTFTAIGAPATFKFFDKNIDRKRYTSTTEILNATLIHQSITGLYETRIDLSKLGGD

SEQ ID NO: 1248 - protein, 1345 aa, Streptococcus mutans
MKKPYSIGLDIGTNSVGWAVVTDDYKVPAKKMKVLGNTDKSHIKKNLLGALLFDSGNTAEDRRLKRTARRRYTRRRNRILYLQEIFSEEMGKVDDSFFHRLEDSFLVTEDKRGERHPIFGNLEEEVKYHENFPTIYHLRQYLADNPEKVDLRLVYLALAHIIKFRGHFLIEGKFDTRNNDVQRLFQEFLAVYDNTFENSSLQEQNVQVEEILTDKISKSAKKDRVLKLFPNEKSNGRFAEFLKLIVGNQADFKKHFELEEKAPLQFSKDTYEEELEVLLAQIGDNYAELFLSAKKLYDSILLSGILTVTDVSTKAPLSASMIQRYNEHQMDLAQLKQFIRQKLSDKYNEVFSDVSKDGYAGYIDGKTNQEAFYKYLKGLLNKIEGSGYFLDKIEREDFLRKQRTFDNGSIPHQIHLQEMRAIIRRQAEFYPFLADNQDRIEKILTFRIPYYVGPLARGKSDFAWLSRKSADKITPWNFDEIVDKESSAEAFINRMTNYDLYLPNQKVLPKHSLLYEKFTVYNELTKVKYKTEQGKTAFFDANMKQEIFDGVFKVYRKVTKDKLMDFLEKEFDEFRIVDLTGLDKENKVFNASYGTYHDLCKILDKDFLDNSKNEKILEDIVLTLTLFEDREMIRKRLENYSDLLTKEQVKKLERRHYTGWGRLSAELIHGIRNKESRKTILDYLIDDGNSNRNFMQLINDDALSFKEEIAKAQVIGETDNLNQVVSDIAGSPAIKKGILQSLKIVDELVKIMGHQPENIVVEMARENQFTNQGRQNSQQRLKGLTDSIKEFGSQILKEHPVENSQLQNDRLFLYYLQNGRDMYTGEELDIDYLSQYDIDHIIPQAFIKDNSIDNRVLTSSKENRGKSDDVPSEDVVRKMKSYWSKLLSAKLITQRKFDNLTKAERGGLTDDDKAGFIKRQLVETRQITKHVARILDERFYTETDENNKKIRQVKIVTLKSNLVSNFRKEFELYKVREINDYHHAHDAYLNAVIGKALLGVYPQLEPEFVYGDYPHFHGHKENKATAKKFFYSNIMNFFKKDDVRTDKNGEIIWKKDEHISNIKKVLSYPQVNIVKKVEEQTGGFSKESILPKGNSDKLIPRKTKKFYWDTKKYGGFDSPIVAYSILVIADIEKGKSKKLKTVKALVGVTIMEKMTFERDPVAFLERKGYRNVQEENIIKLPKYSLFKLENGRKRLLASARELQKGNEIVLPNHLGTLLYHAKNIHKVDEPKHLDYVDKHKDEFKELLDVVSNFSKKYTLAEGNLEKIKELYAQNNGEDLKELASSFINLLTFTAIGAPATFKFFDKNIDRKRYTSTTEILNATLIHQSITGLYETRIDLSKLGGD

SEQ ID NO: 1249 - protein, 1345 aa, Streptococcus mutans; identical to SEQ ID NO: 1248

SEQ ID NO: 1250 - protein, 1345 aa, Streptococcus mutans; identical to SEQ ID NO: 1244

SEQ ID NO: 1251 - protein, 1345 aa, Streptococcus mutans; identical to SEQ ID NO: 1245

SEQ ID NO: 1252 - protein, 1345 aa, Streptococcus mutans; identical to SEQ ID NO: 1246

SEQ ID NO: 1253 - protein, 1345 aa, Streptococcus mutans; identical to SEQ ID NO: 1247

SEQ ID NO: 1254 - protein, 1345 aa, Streptococcus mutans; identical to SEQ ID NO: 1246

SEQ ID NO: 1255 - protein, 1345 aa, Streptococcus mutans; identical to SEQ ID NO: 1246

SEQ ID NO: 1256 - protein, 1345 aa, Streptococcus mutans; identical to SEQ ID NO: 1246

SEQ ID NO: 1257 - protein, 1345 aa, Streptococcus mutans; identical to SEQ ID NO: 1247

SEQ ID NO: 1258 - protein, 1345 aa, Streptococcus mutans
MKKPYSIGLDIGTNSVGWAVVTDDYKVPAKKMKVLGNTDKSHIKKNLLGALLFDSGNTAEDRRLKRTARRRYTRRRNRILYLQEIFSEEMGKVNDSFFHRLEDSFLVTEDKRGERHPIFGNLEEEVKYHENFPTIYHLRQYLADNPEKVDLRLVYLALAHIIKFRGHFLIEGKFDTRNNDVQRLFQEFLAVYDNTFENSSLQEQNVQVEEILTDKISKSAKKDRVLKLFPNEKSNGRFAEFLKLIVGNQADFKKHFELEEKAPLQFSKDTYEEELEVLLAQIGDNYAELFLSAKKLYDSILLSGILTVTDVSTKAPLSASMIQRYNEHQMDLAQLKQFIRQKLSDKYNEVFSDVSKDGYAGYIDGKTNQEAFYKYLKGLLNKIEGSGYFLDKIEREDFLRKQRTFDNGSIPHQIHLQEMRAIIRRQAEFYPFLADNQDRIEKILTFRIPYYVGPLARGKSDFAWLSRKSADKITPWNFDEIVDKESSAEAFINRMTNYDLYLPNQKVLPKHSLLYEKFTVYNELTKVKYKTEQGKTAFFDANMKQEIFDGVFKVYRKVTKDKLMDFLEKEFDEFRIVDLTGLDKENKVFNASYGTYHDLCKILDKDFLDNSKNEKILEDIVLTLTLFEDREMIRKRLENYSDLLTKEQVKKLERRHYTGWGRLSAELIHGIRNKESRKTILDYLIDDGNSNRNFMQLINDDALSFKEEIAKAQVIGETDNLNQVVSDIAGSPAIKKGILQSLKIVDELVKIMGHQPENIVVEMARENQFTKQGRRNSQQRLKGLTDSIKEFGSQILKEHPVENSQLQNDRLFLYYLQNGRDMYTGEELDIDYLSQYDIDHIIPQAFIKDNSIDNRVLTSSKENRGKSDDVPSKDVVRKMKSYWSKLLSAKLITQRKFDNLTKAERGGLTDDDKAGFIKRQLVETRQITKHVARILDERFYTETDENNKKIRQVKIVTLKSNLVSNFRKEFELYKVREINDYHHAHDAYLNAVIGKALLGVYPQLEPEFVYGDYPHFHGHKENKATAKKFFYSNIMNFFKKDDVRTDKNGEIIWKKDEYISNIKKVLSYPQVNIVKKVEEQTGGFSKESILPKGNSDKLIPRKTKKFYWDTKKYGGFDSPIVAYSILVIADIEKGKSKKLKTVKALVGVTIMEKMTFERDPIAFLERKGYRNVQEENIIKLPKYSLFKLENGRKRLLASARELQKGNEIVLPNHLGTLLYHAKNIHKVDEPKHLDYVDKHKDEFKELLDVVSNFSKKYTLAEGNLEKIKELYAQNNGEDLKELASSFINLLTFTAIGAPAAFKFFDKNIDRKRYTSTTEILNATLIHQSITGLYETRIDLSKLGGD

SEQ ID NO: 1259 - protein, 1345 aa, Streptococcus mutans; identical to SEQ ID NO: 1258

SEQ ID NO: 1260 - protein, 1345 aa, Streptococcus mutans
MKKPYSIGLDIGTNSVGWAVVTDDYKVPAKKMKVLGNTDKSHIKKNLLGALLFDSGNTAEDRRLKRTTRRRYTRRRNRILYLQEIFSEEMGKVDDSFFHRLEDSFLVTEDKRGERHPIFGNLEEEVKYHENFPTIYHLRQYLADNPEKTDLRLVYLALAHIIKFRGHFLIEGKFDTRNNDVQRLFQEFLAVYDNTFENSSLQEQNVQVEEILTDKISKSAKKDRVLKLFPNEKSNGCFAEFLKLIVGNQADFKKHFELEEKAPLQFSKDTYEEELEVLLAQIGDNYAELFLSAKKLYDSILLSGILTVTDVSTKAPLSASMIQRYNEHQMDLTQLKQFIRQKLSDKYNEVFSDVSKDGYAGYIDGKTNQEAFYKYLKGLLNKIEGSGYFLDKIEREDFLRKQRTFDNGSIPHQIHLQEMRAIIRRQAEFYPFLADNQDRIEKLLTFRIPYYVGPLASGKSDFAWLSRKSADKITPWNFDEIVDKESSAEAFINRMTNYDLYLPNQKVLPKHSLLYEKFTVYNELTKVKYKTEQGKTAFFDANMKQEIFDGVFKVYRKVTKDKLMDFLEKEFDEFRIVDLTGLDKENKVFNASYGTYHDLCKILDKDFLDNSKNEKILEDIVLTLTLFEDREMIRKRLENYSDLLTKEQVKKLERRHYTGWGRLSAELIHGIRNKESRKTILDYLIDDGNSNRNFMQLINDDALSFKEEIAKAQVIGETDNLNQVVSDIAGSPAIKKGILQSLKIVDELVKIMGHQPENIVVEMARENQFTNQGRRNSQQRLKGLTDSIKEFGSQILKEHPVENSQLQNDRLFLYYLQNGRDMYTGEELDIDYLSQYDIDHIIPQAFIKDNSIDNRVLTSSKENRGKSDDVPSKDVVRKMKSYWSKLLSAKLITQRKFDNLTKAERGGLTDDDKAGFIKRQLVETRQITKHVARILDERFNTETDENNKKIRQVKIVTLKSNLVSNFRKEFELYKVREINDYHHAHDAYLNAVIGKALLGVYPQLEPEFVYGDYPHFHGHKENKATAKKFFYSNIMNFFKKDDVRTDKNGEIIWKKDEHISNIKKVLSYPQVNIVKKVEEQTGGFSKESILPKGNSDKLIPRKTKKFYWDTKKYGGFDSPIVAYSILVIADIEKGKSKKLKTVKALVGVTIMEKMTFERDPVAFLERKGYRNVQEENIIKLPKYSLFKLENGRKRLLASARELQKGNEIVLPNHLGTLLYHAKNIHKVDEPKHLDYVDKHKDEFKELLDVVSNFSKKYTLAEGNLEKIKELYAQNNGEDLKELASSFINLLTFTAIGAPATFKFFDKNIDRKRYTSTTEILNATLIHQSITGLYETRIDLSKLGGD

SEQ ID NO: 1261 - protein, 1345 aa, Streptococcus mutans; identical to SEQ ID NO: 1260

SEQ ID NO: 1262 - protein, 1350 aa, Streptococcus mutans
MKKPYSIGLDIGTNSVGWAVVTDDYKVPAKKMTVLGNTDKSHIKKNLLGALLFDSGNTAADRRLKRTARRRYTRRRNRILYLQEIFAEEMSKVDDSFFHRLEDSFLVTEDKRGERHPIFGNLEEEVKYHENFPTIYHLRQYLADNPEKVDLRLVYLALAHIIKFRGHFLIEGKFDTRNNDVQRLFQEFLAVYDNTFENSSLQEQNVQVEEILTDKISKSAKKDRVLKLFPNEKSNGRFAEFLKLIVGNQADFKKHFELEEKTPLQFSKDTYEEELEVLLAQIGDNYAELFLSAKKLYDSILLSGILTVTDVSTKAPLSASMIQRYNEHQMDLAQLKQFIRQKLSDKYNEVFSDVSKDGYAGYIDGKTNQEAFYKYLKGLLNKIEGSGYFLDKIEREDFLRKQRTFDNGSIPHQIHLQEMRAIIRRQAEFYPFLADNQDRIEKILTFRIPYYVGPLARGKSDFAWLSRKSADKITPWNFDEIVDKESSAEAFINRMTNYDLYLPNQKVLPKHSLLYEKFTVYNELTKVKYKTEQGKTAFFDANMKQEIFDGVFKVYRKVTKDKLMDFLEKEFDEFRIVDLTGLDKENKAFNASYGTYHDLRKILDKDFLDNSKNEKILEDIVLTLTLFEDREMIRKRLENYSDLLTKEQVKKLERRHYTGWGRLSAELIHGIRNKESRKTILDYLIDDGNSNRNFMQLINDDALSFKEEIAKAQVIGETDNLNQVVSDIAGSPAIKKGILQSLKIVDELVKIMGHQPENIVVEMARENQFTNQGRRNSQQRLKGLTDSIKEFGSQILKEHPVENSQLQNDRLFLYYLQNGRDMYTGEELDIDYLSQYDIDHIIPQAFIKDNSIDNRVLTSSKENRGKSDDVPSEDVVNRMRPFWNKLLSSGLISQRKYNNLTKKELTPDDKAGFIKRQLVETRQITKHVARMLDERFNKEFDDNNKRIRRVKIVTLKSNLVSSFRKEFELYKVREINDYHHAHDAYLNAVVVKALLVKYPKLEPEFVYGEYPKYNSYRERKTATQKMFFYSNIMNMFKSKVKLADDQIVERPMIEVNDETGEIAWDKTKHITTVKKVLSYPQVNIVKKVEEQTIGQNGGLFDDNPKSPLEVIPSKLVPLKKALNPEKYGGYQKPTTAYPILLIVDTKQLIPISVMDKKRFEQNPVKFLKDKGYQQIEKNNFVKLPKYTLVDIGNGIKRLWASSKEVHKGNQLVVSKKSQDLLYHAHHLDNDYSNEYVKNHYQQFDILFNEITSFSKKCKLGKEHIQKIEEAYSKERDSASIEELADGFIKLLGFTQLGATSPFSFLGIKLNQKQYTGKKDYLLPCMEATLIHQSITGLYETRIDLSKLGGD

SEQ ID NO: 1263 - protein, 1350 aa, Streptococcus mutans; identical to SEQ ID NO: 1262

SEQ ID NO: 1264 - protein, 1345 aa, Streptococcus mutans
MKKPYSIGLDIGTNSVGWAVVTDDYKVPDKKMKVLGNTDKSHIKKNLLGALLFDSGNTAEDRRLKRTARRRYTRRRNRILYLQEIFSEEMGKVDDSFFHRLEDSFLVTEDKRGERHPIFGNLEEEVKYHENFPTIYHLRQYLADNPEKTDLRLVYLALAHIIKFRGHFLIEGKFDTRNNDVQRLFQEFLAVYDNTFENSSLQEQNVQVEEILTDKISKSAKKDRVLKLFPNEKSNGRFAEFLKLIVGNQADFKKHFELEEKAPLQFSKDIYEEELEVLLAQIGDNYAELFLSAKKLYDSILLSGILTVTDVSTKAPLSASMIQRYNEHQMDLAQLKQFIRQKLSDKYNEVFSDVSKDGYAGYIDGKTNQEAFYKYLKGLLNKIEGSGYFLDKIEREDFLRKQRTFDNGSIPHQIHLQEMRAIIRRQAEFYPFLADNQDRIEKILTFRIPYYVGPLARGKSDFAWLSRKSADKITPWNFDEIVDKESSVEAFINRMTNYDLYLPNQKVLPKHSLLYEKFTVYNELTKVKYKTEQGKTAFFDANMKQEIFDGVFKVYRKVTKDKLMDFLEKEFDEFRIVDLTGLDKENKAFNASYGTYHDLRKILDKDFLDNSKNEKILEDIVLTLTLFEDREMIRKRLKNYSDLLTKEQLKKLERRHYTGWGRLSAELIHGIRNKESRKTILDYLIDDGNSNRNFMQLINDDALSFKEEIAKAQVIGETDNLNQVVSDIAGSPAIKKGILQSLKIVDELVKIMGHQPENIVVEMARENQFTNQGRRNSQQRLKGLTDSIKEFGSQILKEHPVENSQLQNDRLFLYYLQNGRDMYTGEELDIDYLSQYDIDHIIPQAFIKDNSIDNRVLTSSKENRGKSDDVPSKDVVRKMKSYWSKLLSAKLITQRKFDNLTKAERGGLTDDDKAGFIKRQLVETRQITKHVARILDERFYTETDENNKKIRQVKIVTLKSNLVSNFRKEFELYKVREINDYHHAHDAYLNAVIGKALLGVYPQLEPEFVYGDYPHFHGHKENKATAKKFFYSNIMNFFKKDDVRTDKNGEIIWKKDEHISNIKKVLSYPQVNIVKKVEEQTGGFSKESILPKGNSDKLIPRKTKKFYWDTKKYGGFDSPIVAYSILVIADIEKGKSKKLKTVKALVGVTIMEKMTFERDPVAFLERKGYRNVQEENIIKLPKYSLFKLENGRKRLLASARELQKGNEIVLPNHLGTLLYHAKNIHKVDEPKHLDYVDKHKDEFKELLDVVSNFSKKYTLAEGNLEKIKELYAQNNGEDLKELASSFINLLTFTAIGAPATFKFFDKNIDRKRYTSTTEILNATLIHQSITGLYETRIDLSKLGGD

SEQ ID NO: 1265 - protein, 1345 aa, Streptococcus mutans
MKKPYSIGLDIGTNSVGWAVVTDDYKVSAKKMKVLGNTDKSHIKKNLLGALLFDSGNTAEDRRLKRTARRRYTRRRNRILYLQEIFAEEMSKVDDSFFHRLEDSFLVTEDKRGERHPIFGNLEEEVKYHENFPTIYHLRQYLADNPEKVDLRLVYLALAHIIKFRGHFLIEGKFDTRNNDVQRLFQEFLAVYDNTFENSSLQEQNVQVEEILTDKISKSAKKDRVLKLFPNEKSNGRFAEFLKLIVGNQADFKKHFELEEKAPLQFSKDTYEEELEVLLAQIGDNYAELFLSAKKLYDSILLSGILTVTDVSTKAPLSASMIQRYNEHQMDLAQLKQFIRQKLSDKYNEVFSDVSKDGYAGYIDGKTNQEAFYKYLKGLLNKIEGSGYFLDKIEREDFLRKQRTFDNGSIPHQIHLQEMRAIIRRQAEFYPFLADNQDRIEKILTFRIPYYVGPLARGKSDFAWLSRKSADKITPWNFDEIVDKESSAEAFINRMTNYDLYLPNQKVLPKHSLLYEKFTVYNELTKVKYKTEQGKTAFFDANMKQEIFDGVFKVYRKVTKDKLMDFLEKEFDEFRIVDLTGLDKENKAFNASYGTYHDLRKILDKDFLDNSKNEKILEDIVLTLTLFEDREMIRKRLENYSDLLTKEQVKKLERRHYTGWGRLSAELIHGIRNKESRKTILDYLIDDGNSNRNFMQLINDDALSFKEEIAKAQVIGETDNLNQVVSDIAGSPAIKKGILQSLKIVDELVKIMGHQPENIVVEMARENQFTNQGRRNSQQRLKGLTDSIKEFGSQILKEHPVEHSQLQNDRLFLYYLQNGRDMYTGEELDIDYLSQYDIDHIIPQAFIKDNSIDNRVLTSSKENRGKSDDVPSKNVVRKMKSYWSKLLSAKLITQRKFDNLTKAERGGLTDDDKAGFIKRQLVETRQITKHVARILDERFHTETDENNKKIRQVKIVTLKSNLVSNFRKEFELYKVREINDYHHTHDAYLNAVIGKALLGVYPQLEPEFVYGDYPHFHGHKENKATAKKFFYSNIMNFFKKDDVRTDKNGEIIWKKDEHISNIKKVLSYPQVNIVKKVEEQTGGFSKESILPKGNSDKLIPRKTKKFYWDTKKYGGFDSPIVAYSILVIADIEKGKSKKLKTVKALVGVTIMEKMTFERDPVAFLERKGYRNVQEENIIKLPKYSLFKLENGRKRLLASARELQKGNEIVLPNHLGTLLYHAKNIHKVDEPKHLDYVDKHKDEFKELLDVVSNFSKKYTLAEGNLEKIKELYAQNNGEDLKELASSFINLLTFTAIGAPATFKFFDKNIDRKRYTSTTEILNATLIHQSITGLYETRIDLSKLGGD

SEQ ID NO: 1266 - protein, 1345 aa, Streptococcus mutans; identical to SEQ ID NO: 1265

SEQ ID NO: 1267 - protein, 1345 aa, Streptococcus mutans
MKKPYSIGLDIGTNSVGWSVVTDDYKVPAKKMKVLGNTDKSHIEKNLLGALLFDSGNTAEDRRLKRTARRRYTRRRNRILYLQEIFSEEMGKVDDSFFHRLEDSFLVTEDKRGERHPIFGNLEEEVKYHENFPTIYHLRQYLADNPEKVDLRLVYLALAHIIKFRGHFLIEGKFDTRNNDVQRLFQEFLAVYDNTFENSSLQEQNVQVEEILTDKISKSAKKDRVLKLFPNEKSNGRFAEFLKLIVGNQADFKKHFELEEKAPLQFSKDTYEEELEVLLAQIGDNYAELFLSAKKLYDSILLSGILTVTDVGTKAPLSASMIQRYNEHQMDLAQLKQFIRQKLSDKYNEVFSDVSKDGYAGYIDGKTNQEAFYKYLKGLLNKIEGSGYFLDKIEREDFLRKQRTFDNGSIPHQIHLQEMRAIIRRQAEFYPFLADNQDRIEKLLTFRIPYYVGPLARGKSDFAWLSRKSADKITPWNFDEIVDKESSAEAFINRMTNYDLYLPNQKVLPKHSLLYEKFTVYNELTKVKYKTEQGKTAFFDANMKQEIFDGVFKVYRKVTKDKLMDFLEKEFDEFRIVDLTGLDKENKVFNASYGTYHDLCKILDKDFLDNSKNEKILEDIVLTLTLFEDREMIRKRLENYSDLLTKEQVKKLERRHYTGWGRLSAELIHGIRNKESRKTILDYLIDDGNSNRNFMQLINDDALSFKEEIAKAQVIGETDNLNQVVSDIAGSPAIKKGILQSLKIVDELVKIMGHQPENIVVEMARENQFTNQGRRNSQQRLKGLTDSIKEFGSQILKEHPVENSQLQNDRLFLYYLQNGRDMYTGEELDIDYLSQYDIDHIIPQAFIKDNSIDNRVLTSSKENRGKSDDVPSKDVVRKMKSYWSKLLSAKLITQRKFDNLTKAERGGLTDDDKAGFIKRQLVETRQITKHVARILDERFNTETDENNKKIRQVKIVTLKSNLVSNFRKEFELYKVREINDYHHAHDAYLNAVIGKALLGVYPQLEPEFVYGDYPHFHGHKENKATAKKFFYSNIMNFFKKDDVRIDKNGEIIWKKDEHISNIKKVLSYPQVNIVKKVEEQTGGFSKESILPKGNSDKLIPRKTKKFYWDTKKYGGFDSPIVAYSILVIADIEKGKSKKLKTVKALVGVTIMEKMTFERDPVAFLERKGYRNVQEENIIKLPKYSLFKLENGRKRLLASARELQKGNEIVLPNHLGTLLYHAKNIHKVDEPKHLDYVDKHKDEFKELLDVVSNFSKKYTLAEGNLEKIKELYAQNNGEDLKELASSFINLLTFTAIGAPATFKFFDKNIDRKRYTSTTEILNATLIHQSITGLYETRIDLSKLGGD

SEQ ID NO: 1268 - protein, 1345 aa, Streptococcus mutans; identical to SEQ ID NO: 1267

SEQ ID NO: 1269 - protein, 1355 aa, Streptococcus mutans
MKKSYSIGLDIGTNSVGWAVVTDDYKVPAKKMKVLGNTDKSHIKKNLLGALLFDSGNTAEDRRLKRTARRRYTRRRNRILYLQEIFSEEMGKVDDSFFHRLDESFLTDDDKNFDSHPIFGNKAEEDAYHQKFPTIYHLRKHLADSTEKADLRLVYLALAHMIKFRGHFLIEGELNAENTDVQKLFADFVGVYDRTFDDSHLSEITVDASSILTEKISKSRRLEKLINNYPKEKKNTLFGNLIALSLGLQPNFKTNFKLSEDAKLQFSKDTYEEDLEELLGKIGDDYADLFTLAKNLYDAILLSGILTADDSSTKAPLSASMIKRYAEHHEDLEKLKEFIKANKPELYHDIFKDETKNGYAGYIENGVKQDEFYKYLKNTLSKIAGSDYFLDKIEREDFLRKQRTFDNGSIPHQIHLQEMHAILRRQGDYYPFLKENQDRIEKILTFRIPYYVGPLARKNSRFAWAEYHSDEAVMPWNFDQVIDKESSAQAFIEHMTNNDLYLPNEKVLPKHSPLYEKYTVYNELTKIKYVTEIGEAKFFDANLKQEIFDGLFKHERKVTKKKLRTFLDKNFDEFRIVDIQGLDKETETFNASYATYQDLLKVIKDKVFMDNPENAEILENIVLTLTLFEDREMIKQRLAKYADVFDKKVIDQLARRHYTGWGRLSAKLLNGIRDKQSCKTIMDYLIDDAQSNRNLMQLITDDNLTFKDDIVKAQYVDNSDDLHQVVQSLAGSPAIKKGILQSLKIVDELVKVMGKEPEQIVVEMARENQTTAKGRRNSQQRYKRLKEAIKSLDRDLNHKILKEHPTDNQALQNNRLFLYYLQNGRDMYTGESLDINRLSDYDIDHVIPQAFIKDNSIDNRVLTSSKANRGKSDDVPSEDVVNRMRPFWNKLLSSGLISQRKYNNLTKKELTPDDKAGFIKRQLVETRQITKHVARMLDERFNKEFDDNNKRIRRVKIVTLKSNLVSSFRKEFELYKVREINDYHHAHDAYLNAVVVKALLVKYPKLEPEFVYGEYPKYNSYRERKTATQKMFFYSNIMNMFKSKVKLADDQIVERPMIEVNDETGEIAWDKTKHITTVKKVLSYPQVNIVKKVEEQTIGQNGGLFDDNPKSPLEVIPSKLVPLKKALNPEKYGGYQKPTTAYPILLIVDTKQLIPISVMDKKRFEQNPVKFLKDKGYQQIEKNNFVKLPKYTLVDIGNGIKRLWASSKEVHKGNQLVVSKKSQDLLYHAHHLDNDYSNEYVKNHYQQFDILFNEITSFSKKCKLGKEHIQKIEEAYSKERDSASIEELADGFIKLLGFTQLGATSPFSFLGIKLNQKQYTGKKDYLLPCMEATLIHQSITGLYETRIDLNKLGGD

SEQ ID NO: 1270 - protein, 1355 aa, Streptococcus mutans; identical to SEQ ID NO: 1269

SEQ ID NO: 1271 - protein, 1125 aa, Streptococcus mutans
MTNGKILGLDIGIASVGVGIINAKTGNVEHASSRIFPAANADNNVERRSARGGRRLIRRKKHRLKRVEDLFEKYNIDTDFSNLNLNPYQLRVKGLNEQLSNEELFAILKNIAKRRGISYLDDAEDDSVGSSDYAKAIDENRKLLKKQTPGEIQLKRLEKYGQLRGNFTIQDENGEYHRLINVFSTSDYVKEARRILETQSYYNKFITESFVEDYIKILQGKRKYYVGPGNEKSRTDYGIYRTDGETLDNLFGILIGKCGFYPEEYRAAKASYTAQEYNFLNDLNNLTVPTETKKLSTEQKYQLVDFAKTASTLEAAKLLKEIAKLVGCQVEEIKGYRLDNKDKPDLHTFEPFRKLKSNLTTIAVENLSITTLDTLAHILTLNTEREGIEEAIQKELPNIFSDEQITGIIAVRKKNSQIFGKGWHSFSIKLMKELIPELYETSEEQMTILIRLKKVKTNSKITNRTKYINEQEVTDEIYNPVVSKSIRQTVKIINAAIKKYGAFDQIVIEMPRESNEEDERKFIADLQKSNAKEKDDAMKQAALLYNGKAELPHGVFHGHKELATKIRLWYQQGERCLYSGKHIDIHDLIHNQHMFEIDHVLPLSLSFDDSLANKVLVYSWANQEKGQRTPFQALPQMASAWSFRELRDYISKQKGISKKKRDYLLTEQDINKVEVKQKFIERNLVDTRYVSRVVLNTLQDALKVMNKETKISVIRGQFTSQLRRQWRIDKSRETYHHHAVDALIIAASSQLRLWKKQNNPMFAEDKHGQKINLDTGEVLSDDAYKELVYQAPYQGFVNTISSKSFEDEILFSYQVDSKVNRKISDATIYATRQAQLGKDKKEETYVLGKIKDIYSQAGYDAFRKKYDKDKAVFLMYQKDPETWEKVIEVILRDYKELDDKGKEIGNPFERYKVKHGFVRKYSRKNKGTEIKSLKYYDNKLGNHIDITPNNSKHSVVLQSINPWRADLYFNPETTKYELMGLKYADLSFEKGTGKYSISREKYDEIKEREGISSKSEFKFTLYKNDLILVKDIGNHKELIARFNSKNDTSKHYVELKPWNKAKFDSEEELIPAFGKVAKSGQFIKGLNKPDLSIYKVKTDILGHKYYIKKEGDKPKLNFENKIKNK

SEQ ID NO: 1272 - protein, 1125 aa, Streptococcus mutans
MTNGKILGLDIGIASVGVGIINAKTGNVEHASSRIFPAANADNNVERRSARGGRRLIRRKKHRLKRVEDLFEKYNIDTDFSNLNLNPYQLRVKGLNEQLSNEELFAILKNIAKRRGISYLDDAEDDSVGSSDYAKAIDENRKLLKKQTPGEIQLKRLEKYGQLRGNFTIQDENGEYHRLINVFSTSDYVKEARRILETQSYYNKFITESFVEDYIKILQGKRKYYVGPGNEKSRTDYGIYRTDGETLDNLFGILIGKCGFYPEEYRAAKASYTAQEYNFLNDLNNLTVPTETKKLSTEQKYQLVDFAKTASTLGAAKLLKEIAKLVGCQVEEIKGYRLDNKDKPDLHTFEPFRKLKSNLTTIAVENLSITTLDTLAHILTLNTEREGIEEAIQKELPNIFSDEQITEIIAVRKKNSQIFGKGWHSFSIKLMKELIPELYETSEEQMTILTRLKKVKTNSKITNRTKYINEEEITDEIYNPVVSKSIRQTVKIINATIKKYGAFDQIIIEMPRESNEEDERKFIADLQKSNAKEKDDAMKQAALLYNGKDELPHDVFHGHKELATKIRLWYQQGERCLYSGKHIDIHDLIHNQHMFEIDHVLPLSLSFDDSLANKVLVYSWANQEKGQRTPFQALPQMASAWSFRELRDYISKQKGISKKKRDYLLTEQDINKVEVKQKFIERNLVDTRYVSRVVLNTLQDALKVMNKETKISVIRGQFTSQLRRQWRIDKSRETYHHHAVDALIIAASSQLRLWKKQNNPMFAEDKHGQKINLDTGEVLSDDAYKELVYQAPYQGFVNTISSKSFEDEILFSYQVDSKVNRKISDATIYATRQAQLGKDKKEETYVLGKIKDIYSQAGYDAFRKKYDKDKAVFLMYQKDPETWEKVIEVILRDYKELDDKGKEIGNPFERYKVKHGFVRKYSRKNKGTEIKSLKYYDNKLGNHIDITPNNSKHSVVLQSINPWRADLYFNPETTKYELMGLKYADLSFEKGTGKYSISREKYDEIKEREGISSKSEFKFTLYKNDLILVKDIGNHKELIARFNSKNDTSKHYVELKPWNKAKFDSEEELIPAFGKVAKSGQFIKGLNKPDLSIYKVKTDILGHKYYIKKEGDKPKLNFENKIKNK

SEQ ID NO: 1273 - protein, 1125 aa, Streptococcus mutans; identical to SEQ ID NO: 1272

SEQ ID NO: 1274 - protein, 1125 aa, Streptococcus mutans; identical to SEQ ID NO: 1271

SEQ ID NO: 1275 - protein, 670 aa, Streptococcus oralis
MAKFNKNYSIGLDIGVSSVGYAVVTEDYRVPAFKFKVLGNTEKEKIKKNLIGSTTFVPAQSAQGTRVFRVNRRRIDRRNHRIAYLRDIFQKEIGKIDKNFYRRLDESFRVLGDKSEDIQIKQPFFGNKELETAYHKKYPTIYHLRKHLADADKNSPVADIREVYMALSHIFKYRGHFLTLGKIDPNNINMQNSWIDFIESCQDAFDLEISDESKTIAAIFKSSDNRQEKVKGILSYFQPELAKKDKSIFKQLLQLLFGLKTKFKECFELEEEPDLNFSKENYDENLENLLGTLEEDFPDVFAKLKILRDTILLSDMLTYTGATHARFSATMVERYEEHRKDLQRFKSFVKQNLSEQDYLDIFGRKTPNGFDVDKETKGYVGYISNKMVLTNKQKTIQQNFYDYISGKITGIEGAEYFLNKISDGTFLRKLRTTDNGTIPNQIHAYELEKIIERQGRDYPFLLENKDKLLSILTFKIPYYVGPLAKGNNSRFAWIKRTTSQDVLDNNDEDTKNGKIRPWNYHKLINMDETRDAFITNLIGNDIILLNEKVLPKRSLIYEEVMLQNELTRIKYKDKYGKIHFFDSELRQEIINNLFKTNSKRVSSAMLLAYLENFTNLQAVEIVSGIEKGKSLNSTLKTYNDLKTIFSEDLLDSEIYQKELEEIIKVITVFV

SEQ ID NO: 1276 - protein, 1373 aa, Streptococcus oralis
MENKNYSIGLDIGTNSVGWAVITDDYKVPSKKMKVLGNTDKRFIKKNLIGALLFDEGTTAEARRLKRTARRRYTRRKNRLRYLQEIFAEEMSKVDSSFFHRLDDSFLIPEDKKGSKYPIFATLIEEKEYHKQFPTIYHLRKQLADSKEKTDLRLIYLALAHMIKYRGHFLYEDTFDIKNNDIQKIFNEFISIYNNTFEGNSLSGQNVQVEAIFTDKISKSAKRERVLKLFPDEKSTGLFSEFLKLIVGNQADFKKHFDLEEKAPLQFSRDTYDEDLENLLGQIGDDFADLFVAAKKLYDAILLSGILTVTDPSTKAPLSASMIERYENHQKDLATLKQFIKTNLPEKYDEVFSDQSKDGYAGYIDGKTTQESFYKYIKNLLSKFEGADYFLEKIEREDFLRKQRTFDNGSIPHQIHLQEMNAILRRQGEHYPFLKENKEKIEKILTFRIPYYVGPLARGNRDFAWLTRNSDQAIRPWNFEEIVDKASSAESFINKMTNYDLYLPEEKVLPKHSLLYETFAVYNELTKVKFIAEGLRDYQFLDSRQKKDIFYTLFKAEDKRKVTEKDIIQYLHTVDGYDGIELKGIEKQFNASLSTYHDLLKIIKDKEFMDDPNNEEILENIVHTLTIFEDREMIKQRLAQYDSLFDEKVIKALTRRHYTGWGKLSSKLINGIRDKQTGKTILDYLMDDGYNNRNFMQLINDDELSFKEIIKKAQVVGKTDDVKQVVQELPGSPAIKKGILQSIKLVDELVKVMGHEPESIVIEMARENQTTARGKKNSQQRYKRIEDSLKILASGLNAKILKEHPTDNIQLQNDRLFLYYLQNGRDMYTGKPLDINQLSSYDIDHIVPQAFIKDDSLDNRVLTSLKDNRGKSDNVPSLEVVEKMKTFWQQLLDSKLISYRKFNNLTKAERGGLDERDKVGFIKRQLVETRQITKHVAQILDARYNTEVNEKDKKNRTVKIITLKSNLVSNFRKEFRLYKIREINDYHHAHDAYLNAVVAKAILKKYPKLEPEFVYGDYQKYDLKRYISRSKDPKEIEKATEKYFFYSNLLNFFKEEVHYADGTIVKRENIEYSKDTGEIAWNKEKDFATIKKVLSLPQVNIVKKREVQTGGFSKESILPKGNSDKLIPRKTKDILWDTTKYGGFDSPVIAYSILLIADIEKGKAKRLKTVKTLVGITIMEKATFEKSPIAFLENKGYHNVRKENILCLPKYSLFELKNGRRRMLASAKELQKGNEIVLPVHLTTLLYHAKNIHRLDEPEHLEYIQKHRNEFKGLLNLVSEFSQKYVLADANLEKIKNLYADNEQADIEILANSFINLLTFTALGAPAAFKFFGKDVDRKRYTTVSEILNATLIHQSITGLYETRIDLSKLGED

SEQ ID NO: 1277 - protein, 1371 aa, Streptococcus oralis
MENKNYSIGLDIGTNSVGWSVITDDYKVPSKKMKVLGNTDKRFIKKNLIGALLFDEGTTAEARRLKRTARRRYTRRKNRLRYLQEIFAEEMSKVDSSFFHRLDDSFLIPEDKRGSKYPIFATLAEEKEYHKQFPTIYHLRKQLADSKEKTDLRLIYLALAHMIKYRGHFLYEDTFDIKNNDIQKIFSEFISIYDNTFEGSSLSGQNAQVEAIFTDKISKSAKRERVLKLFPDEKSTGLFSEFLKLIVGNQADFKKHFDLGEKAPLQFSKDTYDEDLENLLGQIGDDFADLFLVAKKLYDAILLSGILTVTDPSTKAPLSASMIERYENHQKDLAVLKQFIKNNLPEKYDEVFSDQSKDGYAGYIDGKTTQEAFYKYIKNLLSKFEGTDYFLEKIEREDFLRKQRTFDNGSIPHQIHLQEMNAILRRQGEHYPFLKDNKEKIEKILTFRIPYYVGPLARGNRDFAWLTRNSDEAIRPWNFEEIVDKASSAEDFINKMTNYDLYLPEEKVLPKHSLLYETFAVYNELTKVKFIAEGLRDYQFLDSGQKKQIVTQLFKEKRKVTEKDIIQFLHNVDGYDGIELKGIEKQFNASLSTYHDLLKIIKDKEFMDDSKNEEILENIVHTLTIFEDREMIKQRLAQYDSLFDEKVIKALIRRHYTGWGKLSAKLIDGICDKQTGNTILDYLIDDGKNNRNFMQLINDDGLSFKEITQKAQVVGKTDDVKQVVQELPGSPAIKKGILQSIKIVDELVKVMGHTPESIVIEMARENQTTARGKKNSQQRYKRIEDALKNLASGLDSNILKEHPTNNIQLQNDRLFLYYLQNGRDMYTGKPLDINQLSSYDIDHIVPQAFIKDDSLDNRVLTSLKDNRGKSDNVPSIEVVQKRKAFWQQLLDSKLISERKFNNLTKAERGGLDERDKVGFIKRQLVETRQITKHVAQILDARFNKEVNEKDKKNRTVKIITLKSNLVSNFRKEFRLYKVREINDYHHAHDAYLNAVVAKAILKKYPKLEPEFVYGDYQKYDLKRYISRSRNPKEVEKATEKYFFYSNLLNFFKEEVHYADGTIVKRENIEYSKDTGEIAWNKEKDFATIKKVLSYPQVNIVKKREVQTGGFSKESILPKGNSDKLIPRKTKDILWETTKYGGFDSPVIAYSILLIADIEKGKAKKLKTVKTLVGITIMEKAAFEENPITFLENKGYHNVRKENILCLPKYSLFELENGRRRLLASAKELQKGNEIVLPVYLTTLLYHSKNVHKLDEPEHLEYIQKHRNEFKDLLNLVSEFSQKYVLADANLEKIQNLYADNEQADIEILANSFINLLTFTALGAPAAFKFFGKDIDRKRYTTVSEILNATLIHQSITGLYETRIDLSKLGED

SEQ ID NO: 1278 - protein, 1121 aa, Streptococcus oralis
MNGLVLGLDIGIASVGVGILEKNSGKIIHANSRLFPAATADNNVERRKNRQARRLNRRKKHRGVRFQDLFEDYGLLTDFSKVSINLNPYRLRVDGLNQQLTNEELFIALKNIVKRRGISYLDDASEDGGAVSSDYGKAVEENRKLLAEQTPGQIQLERFEKYGQVRGDFTVVENGEKCRLINVFSTSAYRKEAEKILRKQQEFNNQITDEFIEDYLKILTGKRKYYHGPGNEKSRTDYGRFRTDGTTLDNIFGVLIGKCTFYPNEYRASKSSYTAQEFNLLNDLNNLTVPTETKKLSEEQKKVIVEYAKEAKTLGASTLLKYIVKMIDASVDQISGYRVDVNNKPEMHTFEVYRKMQSLETISVGELSRNVLDELAHILTLNTEREGIEEAINSKLMGVFSQDQVLELVQFRKNNSSLFSKGWHNFSLKLMMELIPELYETSEEQMTILTRLGKQKSKETSKRTKYIDEKELTEEIYNPVVAKSVRQAIKIINEATKKHGIFDNIVIEMARENNEEDAKKDYIKRQKANQDEKNAAMEKAAFQYNGKKELPGNIFNGHKELATKIRLWHQQGEKCLYTGKTIPISDLIHNQYKYEIDHILPLSLSFDDSLSNKVLVHATANQEKGQRTPFQALDSMDDAWSYREFKSYVKDLKSLSNKKKDYLLTEEDISKIEVKQKFIERNLVDTRYSSRVVLNALQDFYKSHQFDTTISVVRGQFTSQLRRKWGLEKSRETYHHHAVDALIIAASSQLRLWKKQNNPLITYKEGQFVDSQTGEIISLTDDEYKELVFKAPYDHFVDTLHSKTFEDGILFSYQVDSKYNRKISDATIYATRKAKLDKDKSEETYVLGKIKDIYSQAGYDAFIKIYNKDKRKFLMYHKDPQTFEKVIEEILRTYPSKERNDKNKEVPCNPFEKYRQENGPIRKYSKKGNGPEIKCLKYYDNKLGNYIDISPDGSDNQVVLQSLKPWRTDVYFNHQTKEYELMGLKYSDLSFEKGSGKYSISNEKYNSIKRIEGVNEQSEFKFTLYKNDLILIKDSENNEQKLFRFNSRNDTAKHYVELKPYDKARFDGQQELITILGNVAKGGQCLKGLNKSNISIFKVKTDVLGKKHIIKKEGDEPKLKF

SEQ ID NO: 1279 - protein, 1134 aa, Streptococcus oralis
MNGLVLGLDIGIASVGVGILEKNSGKIVHASSRIFPAATADNNVERRKNRQARRLHRRKKHRGARLKDLFEYYGLLTDFSKVSINLNPYRLRVDGLDQQLTNEELFIALKNIVKRRGISYLDDASEDGGTVSSDYGKAVEENRKLLAEQTPGQIQLERFEKYGQLRGDFTVVENSEKCRLINVFSTSAYKKEAERILRKQQEFNNQITDEFIEDYLKILTGKRKYYHGPGNEKSRTDYGRFRTDGATLDNIFGILIGKCTFYPNEYRASKASYTAQEFNLLNDLNNLTVPTETKKLSEEQKKTIIEYAKSAKTLGASTLLKYIAKMIDASVDQIRGYRVDVNNKPEMHTFEVYRKMQSLETISVGELSRNILDELAHILTLNTEREGIEEAINTKLRDSFSQDQVLELVQFRKNNSSLFSKGWHNFSLKLMMELIPELYETSEEQMTILTRLGKQKSKETSKRTKYIDEKEVTEEIYNPVVAKSVRQAIKIINEATKKHGIFDNIVIEMARENNEEDAKKDYIKRQKANQDEKYAAMEKAAFQYNGKKELPDNIFHGHKELATKIRLWHQQGEKCLYTGKSIPISDLIHNQYKYEIDHILPLSLSFDDSLSNKVLVLATANQEKGQRTPFQALDSMDDAWSYREFKSYVKESKLLGNKKKEYLLTEEDISKIEVKQKFIERNLVDTRYSSRVVLNALQDFYKNHNFDTTISVVRGQFTSQLRRKWGLEKSRETYHHHAVDALIIAASSQLRLWKKQNNPLIAYKEGQFVDSQTGEIISLTDDEYKELVFKAPYDHFVDTLSSKTFEDSILFSYQVDSKFNRKISDATIYATRKAKLDKEKKEYTYTLGKIKDIYSLGTKTPSKTGFYKFLDLYNKDKSQFLMFQKDRKTWDEVIEKIMEQYRPFKEYDKAGKLVDFNPFEKYRQENGPIRKYSKKGNGPEIKSLKYYDILLGKHKNITPEGSRNTVALLSLNPWRTDVYYNMETKKYEFLGLKYADLPFEEGGAYGISTETYNELREKEGIGKNSEFKFTLYKNDLILIKDTETNCQQFFRFWSRTGKDNPKSFEKHKIELKPYEKAKFEKGEELEVLGKVPPSSNQFQKNMQIENLSIYKVKTDVLGNKHFIKKEGDKPKLKF

SEQ ID NO: 1280 - protein, 550 aa, Streptococcus oralis
MYSLDKNGSPTPLYRDQLNQYEVDHIIPYSFLPIDSIDNKVLTHRENNQRKLDNIPDKETVANMKPFWEKLYNAKLISQTKYQRLTTSERTPDGVLTESMKAGFIERQLVETRQIIKHVARILDNRFSDTKIITLKSQLVTNFRNTFHIAKIRELNDYHHAHDAYLAVVVGQTLLKAYPKLAPELIYGHHAHFNRHEENKATIRKYLYSNIMRFFNNPDSKVSKDIWDCNRDLPIIKDIIYNSQVNFVKRTMIKKGAFYNQNPVGKFNKQIAANNRYPLKTKVSSLDTSIYGGYGPMNSALSIIIIAERFNEKKCKIETVKEFHDIFIIDYKKFNNDPFQFLNDTSENGFLKKNNINRVLAFYRVPKYSLMQKIDGTRMLFESKSNLHKATQFKLTKTQNELFFHMRRLLTKSNLMDLKSESAIKESQNFILKHKEEFDNISNQLSAFSQKMLGDTTSLKNLIKGYNERKIKEINSSEETIKYFYDNFIKMFSFVKSGAPKDINDFFNNKYTVARMRPKPDKKLLNATLIHQSITGLYETRIDLSKLGED

SEQ ID NO: 1281 - protein, 1140 aa, Streptococcus parasanguinis
MNGLVLGLDIGIASVGVGILKKDIGEIIHTNSRLFSAATADSNIERRGHRGGKRLTRRKKHRSIRLHDLFEDFGLLTDFSKVSINLNPYQLRVQGLDNQLTNEELFIALKNIVKRRGISYLDDASEDGGTVSSDYGKAVEENRKLLAEQTPGQIQLDRFEKYGQVRGDFNVVENGEKRRLINVFTTSAYSKEAERILRKQQEFNKKITDEFIEDYLTILTGKRKYYHGPGNEKSRTDYGRYTTKKDPEGKYITLDNIFGILIGKCTFYPDEYRASKASYTAQEFNLLNDLNNLTVPTETKKLSEEQKKTIIKYAKTAKTLGASTLLKYIAKLIGASVDQIHGYRIDPNKKPEMHTFETYRKMQSLETISVEELPRKVLDELAHILTLNTEREGIEEAINATLKDTFSQDQVLELVQFRKNNSSLFSKGWHSFSLKLMMELIPELYETSEEQMTILTRLGKQKSKETSKRTKYIDEKELTEEIYNPVVAKSVRQAIKIINEATKKYGIFDNIVIEMARENNEEDAKKEYIKRQKANLDEKNAAMEKAAFQYNGKKELPDNVFHGHKELATKIRLWHQQGEKCLYTGKNIPISDLIQNQYKYEIDHILPLSLSFDDSLSNKVLVLATANQEKGQRTPFQALDSMDDAWSYREFKSYVKDSKLLGNKKKEYLLTEEDISKIEVKQKFIERNLVDTRYSSRVVLNALQDFYKEHQFDTTISVVRGQFTSQLRRKWGLEKSRETYHHHAVDALIIAASSQLRLWKKQNNPLISYTEGQFVDQVTGEIISLSDDEYKELVFKAPYDHFVDTLKSKKFEDSILFSYQVDSKYNRKISDATIYATRKAKLDKENKEYTYTLGKIKDIYALGTKSPSKTGFYKFLDLYNKDKSQFLMFQKDRKTWDEVIEKIIEQYRPFKEYDENGKEVDFNPFEKYRIENGPIRKYSKKGNGPEIKSLKYYDNLLGKFVDITPSESKNPVALLSLNPWRTDVYYNTETSKYEFLGLKYADLCFEKGGAYGISEVKYNKIREKEGIGKESEFKFTLYKNDLILIKDTETNCQQIFRFWSRTGKDNPKSFEKHKIELKPYEKARFEKGEELEVLGKVPPSSNQLQKNMQIENLSIYKVKTDVLGNKHFIKKEGEEPKLKF

SEQ ID NO: 1282 - protein, 1374 aa, Streptococcus pseudoporcinus
MKKRYSYSIGLDIGTNSVGWAVINEDYKVPAKKMTVFGNTDRKTIKKNLLGTVLFDSGETAQARRLKRTNRRRYTRRRYRLCQLQNIFATEMVKVDDTFFQRLSESFFYYQDKAFDKHPIFGNSKEERAYHKTYPTIYHLRKDLADRDQKADLRLIYLALSHIIKFRGHFLIEGKLNSENTDVQKLFIALVTVYNLLFEEEPIAGETCDAKALLTAKTSKSKRLESLISEFPGQKKNGLFGNLLALALGLRPNFKSNFGLSEDAKLQITKDTYEEELDNLLAEIGDHYADLFLAAKNLSDAILLSDILTLSDENTRAPLSASMIKRYEEHQEDLALLKKLVKEQMPEKYWEIFSNAKKNGYAGYIEGKVSQEDFYRYIKPILSRLKGGDEFLAKIDRDDFLRKQRTFDNGSIPHQIHLKELHAILRRQEKYYPFLAEQKEKIEQLLCFRIPYYVGPLAKGGNSSFAWLKRRSDEPITPWNFKDVVDEEASAQAFIEGMTNYDTYLPEEKVLPKHSPLYEMFTVYNELTKVKYIAENMTKPLYLSAEQKEAIIDHLFKQTRKVTVKDLKEKYFSQIEGLENVDVTGVEGAFNASLGTYNDLLKIIKDKAFLDDEANAEILEEIVLILTLFQDEKLIEKRLAKYANLFEKSVLKKLRKRHYRGWGRLSRQLIDGMKDKASGKTILDFLKADDFANRNFIQLINDSSLDFEKLIDDAQKKAIKRESLTEAVANLAGSPAIKKGILQSLKVVDEIVKVMGHNPDNIVIEMSRENQTTAQGLKNARQRLKKIKEVHKKTGSRILEDNSERITNLTLQDNRLYLYLLQDGKDMYTGQDLDINNLSQYDIDHIIPQSFIKDNSIDNLVLTTQKANRGKSDNVPSIEVVRDMKDRVWRRQLANGAISRQKFDHLTKAERGGLADSDKARFLRRQLVETRQITKHVAQLLDSRFNSKSNQNKKLARNVKIITLKSKIVSDFRKDFGLYKLREVNNYHHAHDAYLNAVVGTALLKKYPKLEAEFVYGDYKHFDLVKLISKSDPSLGKATAKVFFYSNIMNFFKEELSLADGTLMKRPVIETNTETGEVVWDKVKDFKTIRKVLSYPQVNIVKKTEIQSGAFSKESVLSKGNSDKLIERKKGWDPKKYGGFDSPNTAYSIFVVAKVAKRKAQKLKTVKEIVGITIMEQAEYEKDNIAFLEKKGYQDIQEKLLIKLPKYSLFELENGRRRLLASANEFQKGNELALSGKYMKFLYLASRYDKLSSKIESEQQKKLFVEQHLHYFDEILDIVVKHATCYIKAENNLKKIISLYKKKEAYSINEQALNMLNLFIFTSLGAPSTFVFFDETIDRKRYTTSSDVLNGILIQQSITGLYETRIDLSRFGGD

SEQ ID NO: 1283 - protein, 1052 aa, Streptococcus pyogenes
LSASMIKRYDEHHQDLTLLKALVRQQLPEKYKEIFFDQSKNGYAGYIDGGASQEEFYKFIKPILEKMDGTEELLAKLNREDLLRKQRTFDNGSIPHQIHLGELHAILRRQEDFYPFLKDNREKIEKILTFRIPYYVGPLARGNSRFAWMTRKSEETITPWNFEEVVDKGASAQSFIERMTNFDKNLPNEKVLPKHSLLYEYFTVYNELTKVKYVTEGMRKPAFLSGEQKKAIVDLLFKTNRKVTVKQLKEDYFKKIECFDSVEISGVEDRFNASLGTYHDLLKIIKDKDFLDNEENEDILEDIVLTLTLFEDREMIEERLKTYAHLFDDKVMKQLKRRRYTGWGRLSRKLINGIRDKQSGKTILDFLKSDGFANRNFMQLIHDDSLTFKEDLQKAQVSGQGDSLHEHIANLAGSPAIKKGILQTVKVVDELVKVMGRHKPENIVIEMARENQTTQKGQKNSRERMKRIEEGIKELGSDILKEYPVENTQLQNEKLYLYYLQNGRDMYVDQELDINRLSDYDVDHIVPQSFLKDDSIDNKVLTRSDKNRGKSDNVPSEEVVKKMKNYWKQLLNAKLITQRKFDNLTKAERGGLSELDKAGFIKRQLVETRQITKHVAQILDSRMNTKYDENDKLIREVRVITLKSKLVSDFRKDFQFYKVREINNYHHAHDAYLNAVVGTALIKKYPKLESEFVYGDYKVYDIRKMIAKSEQEIGKATAKYFFYSNIMNFFKTEITLANGEIRKRPLIETNGETGEIVWDKGRDFATVRKVLSMPQVNIVKKTEVQTGGFSKESILPKRNSDKLIARKKDWDPKKYGGFDSPTVAYSVLVVAKVEKGKSKKLKSVKELVGITIMERSSFEKDPVDFLEAKGYKEVRKDLIIKLPKYSLFELENGRKRMLASAGELQKGNELALPSKYVNFLYLASHYEKLKGSPEDNEQKQLFVEQHKHYLDEIIEQISEFSKRVILADANLDKVLSAYNKHRDKPIREQAENIIHLFTLTNLGAPAAFKCFDTTIGRNRYKSIKEVLDATLIHQSITGLYETRIDLSQLGGD

SEQ ID NO: 1284 - protein, 1368 aa, Streptococcus pyogenes; identical to SEQ ID NO: 37

SEQ ID NO: 1285 - protein, 1367 aa, Streptococcus pyogenes; identical to SEQ ID NO: 241

SEQ ID NO: 1286 - protein, 1368 aa, Streptococcus pyogenes [sequence omitted]

SEQ ID NO: 1287 - protein, 1370 aa, Streptococcus ratti
MKKPYSIGLDIGTNSVGWAVITDDYKVPAKKMKVLGNTDKNYIKKNLLGALLFDSGNTAEDRRLKRTARRRYTRRRNRLLYLQDIFSDEMNKVDESFFHRLEDSFLVSEDKRGDHHPIFGNVVDEVKYHEQFPTIYHLRKYLADTPEKADLRLVYLALAHMIKFRGHFLIDDPKLDVKNTDSQELFSQFLTAYDVTQEDSHLADVKINISDIITEKMNKSRKVEALLFHFPSQKKNSFFGNLVSLVFGLLPNFKTNFNLAEDAKLQLSKDSYDEDLENLLGQIGDEYTDVFVAARKLYDSILLSGILTVNDLSTKAILSASMVRRYEEHNKDLAKLKAFVKANFTHDVFKEVFSDASKNGYAGYIEGKTSQEDFYKYVKNLIGKVDGSADFIEKIDREDFLRKQRTFDNGSIPHQVHLAEMKAILRRQGEYYPFLKEHAEKIQQILTFRIPYYVGPLDRHGHSDFAWASFNSEEKVTPWNFEEIIDKNKSAQAFIERMTNQDLYLPNEKVLPKHSPLYEKYTVYNELTKIKYVTETGTAKFFDANLKQEIFDGLFKKERKVTKRKLLTFLEKNFDEFRIVDIQGLDKETETFNASYGIYQDLLKIIKDKAFMDDSENADILEDIVLTLTLFEDREMIKQRLAKYADLFDKKVIDNLARRRYTGWGRLSAKLLNGIRDKRSRKTIMDYLVDDGRSNRNLMQLITDDNLTFKDEIAKAQYSDNSDDLHQVVQDLAGSPAIKKGILQSVKIVDELVKVMGYEPEQIVVEMARENQTTAKGRRNSQQRYKRLEEAIKNLDRDLNYKILKEHPTDNQALQNDRLFLYYLQNGRDMYTGESLDINRLSDYDIDHIIPQAFIKDNSIDNRVLVSSAKNRGKSDDVPSEDVVNRMRPFWNKLLNCGLISQRKYSNLTKKELTPNDKAGFIKRQLVETRQITKHVARILDEHFNKEFDEDKKRIRKVKVVTLKSNLVSNFRKEFELYKVREINDYHHAHDAYLNAVVAKALLMKYPKLEPEFVYGEYPKYNSYRERKTATQRMFFYSNIMNMFKSKVKLADERIIERPMIEVNDETGEIAWDKTKHIATVKKVLSYPQINIVKKVEEQTGGLTNETIYPRGSFDKLLNRKNTLEASKYGGFGSPTVAYCVLVVADSKNENGKVKKLKLGSELLGITILEKNDFENNSLDFLSRKGYQGVQEKKIIKLPKYSLFEFQDGSRRMLSSVMANDNKRGDLQKANEMILPAYLVKLLYHAKHINSVGEPAHKNYINEHCSEFQDLLNYIRQFADKFVDVDKNLSKIRSLSKSMAEYSVSEICSSFVNLLTLTALGAPADFKFFGTTIPRKRYGSPQSILSATLIHQSITGLYETRIDLSKLGED

SEQ ID NO: 1288 - protein, 1135 aa, Streptococcus salivarius
MSDLVLGLDIGIGSVGVGILNKVTGEIIHKNSRIFPAAQAENNLERRTNRQGRRLTRRKKHRRVRLNHLFEESGLITDFTKVSINLNPYQLRVKGLTAELSNEELFIALKNMVKHRGISYLDDASDDGNSSVGDYAQIVKENSKQLETKTPGQIQLERYQKYGQLRGDFTVEEDGRKHRLINVFPTSAYHAEALRILQTQQEFNPQITDEFINSYLEILTGKRKYYHGPGNEKSRTDYGKYTTKKDAQGQYITLNNIFGILIGKCTFYPEEYRAAKASYTAQEFNLLNDLNNLTVPTETKKLSEEQKYQIITYVKNEKAMGPAKLFKYIAKLLACDIADIKGYRIDKSDKAEIHTFEAYRKMKTLETIDIEQIEREKLDKLAYVLTLNTEREGIQEALDHEFADGTFSQEQVDELVQFRKANSSIFGKGWHSFSVKLMMELIPELYATSEEQMTILTRLGKQKTTSSSNKTKYIDEKQLTEEIYNPVVAKSVRQAIKIVNAAIKKYGDFDNIVIEMARETNEDDEKKAIQKIQKANKAEKDAAMRKAANQYNGKAELPHSVFHGHKQLATKIRLWHQQGERCLYTGKTISIHDLINNPNQFEIDHILPLSITFDDSLANKVLVYATANQEKGQRTPYQALDSMDDAWSFRELKAFVRESKALSNKKKEYLLTEEDISKFDVRKKFIERNLVDTRYASRVVLNALQEHFKAHKIDTKVSVVRGQFTSQLRRHWGIDKTRDTYHHHAVDALIIAASSQLNLWKKQKNTLVSYSEDQLLDIETGELISDDEYKESVFKAPYQHFVDTLKSKEFEDSILFSYQVDSKFNRKISDATIYATRQAKVGKDKKDETYVLGKIKDIYALGTKTPSKTGFYKFLDLYNKDKSQFLVYQKDRKTWDEVIEKIMEQYRPFKESDKNGKEVDFNPFEKYRIENGPIRKYSRKGNGPEIKSLKYYASKLGNHIDITPKDSNNKVVLQSVSPWRADVYFNKTTGSYEILGLKYADLQFEKGTGTYRISEEKYNDIKKKEGVDSDSEFKFTLYKNDLLLIKDTETKEQRLFRFLSRSMPNKKHYVELKPYSKDKFEKNESLIEILGSADKSGRCIKGLAKSNLSIFKVRTDVLGNQHIIKNEGDKPKLDF

SEQ ID NO: 1289 - protein, 1127 aa, Streptococcus salivarius
MSDLVLGLDIGIGSVGVGILNKVTGEIIHKNSRIFPAAQAENNVERRINRQGRRLTRRKKHRRVRLNHLFEESGLITDFTNVSINLNPYQLRVKGLTDELSNEELFIALKNMVKHRGISYLDDASDDGNSSVGDYAQIVKENSKQLETKTPGQIQLERYQKYGQLRGDFTVEEDGKKHRLINVFPTSAYRAEALRILQTQQEFNPQITDEFINSYLQILTGKRKYYHGPGNEKSRTDYGRYTTKKDSEDEYITLDNIFGILIGKCTFYPEEYRAAKASYTAQEFNLLNDLNNLTVPTETKKLSEEQKNQIITNVKNEKAMGPAKLFKYIAKLLSCDVADIKGYRIDKSDKAEIHTFEAYRKMKTLATIDIEQMERENLDKLAYVLTLNTEKEGIQEALEHEFADGTFSQEQIDELVQFRKANSSIFGKGWHSFSVKLMMELIPELYATSEEQMTILTRLGKQKTTSSSNKTKYIDEKQLTEEIYNPVAAKSVRQAIKIVNAAIKEYGDFDNIVIEMARETNEDDEKKAIQKIQKANKDEKDAAMLKAANQYNGKAELPHSVFHGHKQLATKIRLWHQQGERCLYTGKTISIHDLINNSNQFEIDHILPLSITFDDSLANKVLVYATANQEKGQRTPYQALDSMDDAWSFRELKAFVRDSKALSNKKKEYLLTEEDISKFDVRKKFIERNLVDTRYASRVVLNALQEHFRVHKTDTKVSVVRGQFTSQLRRHWGIEKTRDTYHHHAVDALIIAASSQLNLWKKQKNTLVSYSEDQLLDIETGELISDDEYKESVFKAPYQHFVDTLKSKEFEDSILFSYQVDSKFNRKISDATIYATRQAKVGKDKKDETYVLGKIKDIYSQTGYDAFIKIYKKDKSKFLMYRHDPQTFEKVIEPILENYPNKELNEKGKEVPCNPFLKYKEDHGYIRKYSKKGNGPEIKSLKYYDSKLGNHIDITPKNSNNKVVLQSVSPWRADVYFNKTTGKYEILGLKYADLKFEKGTGTYKISEEKYNDIKIKEGVDSDSEFKFTLYKNDLLLIKDTETKEQQLFRFLSRTMPNVKHYVELKPYDKQKFDDNEELIKILGIVAKGGQCKKGVSKPNISIYKIRTDVLGNQHIIKNEGDKPKLDF

SEQ ID NO: 1290 - protein, 1385 aa, Streptococcus salivarius
MTKPYSIGLDIGTNSVGWAVITDDYKVPSKKMKVLGNTSKKYIKKNLLGALLFDSGITAEGRRLKRTARRRYTRRRNRILYLQEIFSTEMATLDDAFFQRLDDSFLVPDDKRDSKYPIFGNLVEEKVYHDEFPTIYHLRKHLADSSKKADLRLVYLALAHMIKYRGHFLIEGDFNSKNNDLQKNFQDFLDTYNAIFESDLSLENSKQLEEIVKDKISKSAKKDRILKLFPGEKNSGIFSEFLKLIVGNQADFRKYFNLDEKTSLQFSKESYDEDLETLLGHIGDDYSDVFLKAKKLYDAILLSGILTVTDNGTEAPLSSAMIMRYKEHEEDLALLKAYIRNISLETYNEVFKDNTKNGYAGYIDGKTSQEDFYVYLKRLLAGLEGADYFLEKIDREDFLRKQRTFDNGSIPYQIYLQEMRAILDKQAKFYPFLAKNKERIEKILTFRIPYYVGPLARGNSDFAWSIRKRNEKITPWNFEDVIDKESSAEAFINRMTSFDLYLPEEKVLPKHSLLYENFTVYNELTKVRFIAEGMRDYQFLDSKQKKDIVRLYFKGKRKVTDKDIIEYLHAIDGYDGIELKGIEKQFNSSLSTYHDLLNIINDKEFLDDSSNETIIEEIIHTLTMFEDREMIKQRLSKFDNIFDKSVLKKLSRRHYTGWGKLSAKLINGIRDEKSGNTILDYLIDDGVSNRNFMQLIHDDALSFKKKIKKAQIIGDKDNIKQVVKSLPGSPAIKKGILQSIKIVDELVKVMGREPESIVVEMARENQYTNQGKSNSQQRLKRLEESLKGLGSKILKENVPTRLSKIDNNALQNDRLYLYYLQNGKDMYTGEELDIDRLSNYDIDHIIPQAFLKDDSIDNKVLVSSASNRGKSDDVPSLEVVKKRKTLWYQLLKSKLISQRKFDNLTKAERGGLSQEEKAGFIQRQLVETRQITKHVARLLDERFNNKKDENNRTLRTVKIITLKSSLVSQFRKDFELYKVREINDFHHAHDAYLNAVVASALLKKYPKLEPEFVYGDYPKYNSFRERKSATEKVYFYSNIMNIFKKSIPLADGTVIDRPLIEVNEETGESVWNKVADLNTVRKVLSYSQVNIVKKVEEQNHGLDRGKPKGLFNANLSSKPKPNSKENLVGAKEYLDPKKYGGYAGISNSFAILVKGTIEKGAKKKITNVLEFQGISILDRIYYRKDKLNFLLEKGYKDIELIIELPKYSLFELSDGSRRMLASILSTNNKRGEIHKGNQIFISQKFVKLLYHAKRISSTFNENHRKYVENHKKEFEELFYYILEFNENYVGAKKNGELLKSAFQSWQNHSIDELCSSFIGPTGSERKGLFELTSRGGAADFEFLGVKIPRYRDYTPSSLLKDATLIHQSVTGLYETRIDLGKLGED

SEQ ID NO: 1291 - protein, 1392 aa, Streptococcus sanguinis
MENKNYSIGLDIGTNSVGWAVITDDYKVPSKKMKVFGNTDKHFIKKNLIGALLFDEGATAEDRRLKRTARRRYTRRKNRLRYLQEIFSEEISKLDSSFFHRLDDSFLVPKDKRGSKYPIFATLEEEKEYHKKFPTIYHLRKHLADSKEKTDLRLIYLALAHMIKYRGHFLYEESFDIKNNDIQKIFNEFISIYDNTFEGSSLSGQNAQVEAIFTDKISKSAKRERVLKLFSDEKSTSLFSEFLKLIVGNQADFKKHFDLEEKAPLQFSKDTYDEDLENLLGQIGDGFTDLFLVAKKLYDAILLSGILTVTDPSTKAPLSASMIERYESHQKDLAALKQFIKNNLPKRYNEVFSDQSKDGYAGYIDGKTTQEAFYKYIKNLLSKFEGADYFLDKIEREDFLRKQRTFDNGSIPHQIHLQEMNAILRRQGEHYPFLKENREKIEKILTFRIPYYVGPLARGNRDFAWLTRNSDQAIRPWNFEEIVDKASSAEEFINKMTNYDLYLPEEKVLPKHSLLYETFAVYNELTKVKFIAEGLRDYQFLDSGQKKQIVNQLFKEKRKVTEKDIIHYLHNVDGYDGIELKGIEKQFNASLSTYHDLLKIIKDKEFMDDPKNEEILENIVHTLTIFEDREMIKQRLAQYDSIFDEKVIKALTRRHYTGWGKLSAKLINGICDKQTGDTILDYLIDDGKINRNFMQLINDDGLSFKEIIQKAQVVGKTDDVKQVVQELPGSPAIKKGILQSIKIVDELVKVMGYAPESIVIEMARENQTTARGKKNSQQRYKRIEDSLKNLAPGLDSNILKENPTDNIQLQNDRLFLYYLQNGKDMYTGKPLDIDQLSSYDIDHIIPQAFIKDDSIDNRVLTSSKDNRGKSDNVPSLEVVQKRKAFWQQLLDSKLISERKFNNLTKAERGGLDERDKVGFIRRQLVETRQITKHVAQILDASFNTEVNEKNQKIRTVKIITLKSNLVSNFRKEFELYKVREINDYHHAHDAYLNAVVAKAILKKYPKLEPEFVYGDYQKYDLKRYISRFKPSKEIEKATEKYFFYSNLLNFFKEEVHYADGIIVKRENIEYSKDTGEIAWNKEKDFATIKKVLSYPQVNIVKKTEIQTHGLDRGKPKGLFNSNPSPKPSEDSKENLVPIKQGLDPRKYGGYAGISNSYAVLVKAIVEKGAKKQQKTILEFQGISILDKINFENNKENYLLKKRYIEILSTITLPKYSLFEFPDGTRRRLASILSTNNKRGEIHKGNELVLPGKYTTLLYHAKNINKKLEPEHLEYVEKHRNDFAKLLECVLNFNDKYVGALKNGERIRQAFTDWETVDIEKLCFSFIGPENSKNAGLFELTSQGSASDFEFLGVKIPRYRDYAPSSLLKATLIHQSITGLYETRIDLSKLGED

SEQ ID NO: 1292 - protein, 1377 aa, Streptococcus sanguinis
MKKPYSIGLDIGTNSVGWAVITDDYKVPSKKMKVLGNTDKHFIKKNLIGALLFDEGTTAEDRRLKRTSRRRYTRRKNRLRYLQEIFSEEISKLDSSFFHRLDDSFLVPEDKRGSKYPIFATLEEEKEYHKKFPTIYHLRKHLADSKEKTDLRLIYLALAHMIKYRGHFLYEESFDIKNNDIQKIFNEFISIYDNTFEGSSLSGQNAQVEAIFTDKISKSTKRERVLKLFSDEKSTGLFSEFLKLIVGNQADFKKHFDLEEKAPLQFSKDTYDEDLENLLGQIGDGFADLFLVAKKLYDAILLSGILTVTDPSTKAPLSASMIERYENHQEDLAALKQFIKNNLSEKYAEVFSDQSKDGYAGFIDGKTTQEAFYKYIKNLLSKLEGADYFLNKIEREDFLRKQRTFDNGSIPHQIHLQEMNAILRRQGEHYLFLKENREKIEKILAFRIPYYVGPLARGNRDFAWLTRNSDQAIRPWNFEEVVDKASSAEDFINKMTNYDLYLPEEKVLPKHSLLYETFAVYNELTKVKFIAEGLRDYQFLDSGQKKQIVNQLFKDKRKVTEKDIIHYLHNVDGYDGIELKGIEKQFNASLSTYHDLLKIIKDKEFMDNPKNGEILENIIHTLTIFEDREMIKQRLAQYDTLFDEKVIKALTRRHYTGWGKLSAKLINGIRDKQTGKTILEYLIDDGDCNRNFMQLINDDGLSFKEIIQKAQVVGKTDDVKQVVQEIPGSPAIKKGILQSIKIVDELVKVMGHNPESIVIEMARENQTTAKGKKNSQQRYKRIEDALKNLAPGLDSNILKENPTDNIQLQNDRLFLYYLQNGKDMYTGKAIDINQLSNYDIDHIIPQAFIKDDSLDNRVLTSSKDNRGKSDNVPSIEVVQKRKAFWQQLLDSKLISERKFNNLTKAKRGGLDERDKVGFIKRQLVETRQITKHVAQLLDTRFNTEVNEENQKIRTVKIITLKSNLVSNFRKEFGLYKVREINDYHHAHDAYLNAVVAKAILKKYPKLEPEFVYGDYQKYDLKRYILKSKASNTIDKATEKYFFYSNLLNFFKEKVRYADGTIKKRENIEYSNDTGEIAWNKEKDFATIKKVLSLPQVNIVKKTEEQTVGQNGGLFDNNIVSKKKVVDASKLIPIKSSLSPEKYGGYARPTIAYSVLVIADIEKGKGKAKKLKRIKEIVGITIQDKKKFESNPVTYLEECGYKNINSNLIIKLPKYSLFEFNDGQRRLLASSIELQKGNELILPYHLTALLYHAQRINKISEPIHKQYVEAHQNEFKELLTTIISLSKKYIQKPNVELLLQQAFDQADKDIYQLSESFISLLKLTSFGAPGAFKFLGVEISQSSVRYKPNSQFLDTTLIHQSITGLYETRIDLSKLGED

SEQ ID NO: 1293 - protein, 1370 aa, Streptococcus sanguinis
MKKPYSIGLDIGTNSVGWAVVTDDYKVPAKKMRVFGDTDRSHIKKNLLGTLLFDDGNTAESRRLKRTARRRYTRRRNRILYLQEIFTESMNEIDESFFHRLDDSFLVPEDKRGSKYPIFATLQEEKEYHKQFPTIYHLRKQLADSKEKSDVRLIYLALAHMIKYRGHFLYEETFDIKNNDIQKIFNEFINIYDNTFEGSSLSGQNAQVEAIFTDKISKSAKRERVLKLFPDEKSTGLFSEFLKLIVGNQADFKKHFDLEEKAPLQFSKDTYDEELENLLGQIGDDFADLFLIAKKLYDAILLSGILTVTDPSTKAPLSASMIERYENHQKDLAALKQFIKNNLPEKYVEVFSDQSKDGYAGYIDGKTTQEAFYKYIKNLLSKFEGADYFLDKIEREDFLRKQRTFDNGSIPHQIHLQEMNAILRRQGEHYPFLKENREKIEKILTFRIPYYVGPLARDNRDFSWLTRNSDEPIRPWNFEEVVDKARSAEDFIHRMTNYDLYLPEEKVLPKHSLLYETFAVYNELTKVKFIAEGLRDYQFLDSGQKKQIVNQLFKEKRKVTEKDIIHYLHNVDGYDGIELKGIEKQFNANLSTYHDLLKITKDKEFMDDPKNEEILENIVHTLTIFEDREMIKQRLAQYDTLFDEKVIKALTRRHYTGWGKLSAKLINGIRDKQSGKTILDYLIDDDKINRNFMQLINDDGLSFKEIIQKAQVVGKTDDVKQVVQELPGSPAIKKGILQSIKIVDELVKVMGYALESIVIEMARENQTTARGKKNSQQRYKRIEDALKNLAPGLDSNILKENPTDNIQLKNDRLFLYYLQNGKDMYTGKPLDINQLSSYDIDHIIPQAFIKDDSIDNRVLTSSKDNRGKSDNVPSLEVVQKRKAFWQQLLDSKLISERKFNNLTKAERGGLDERDKVGFIRRQLVETQQITKNVAQILDARFNTEVKEKNQKIRTVKIITLKSNLVSNFRKEFGLYKVREINNYHHAHDAYLNAVVAKAILKKYPKLEPEFVYGDYQKYDLKKYISRFKPSKEIEKATEKYFFYSNLLNFFKEEVLYADGTIRKRENIEYSKDTGEIAWDKEKDFATIKKVLSYPQVNIVKKREVQTGGFSKESILPKGNSDKLIPRKTKDILWDTTKYGGFDSPVIAYSILLIADIEKGKAKKLKTVKTLVGITIMEKAAFEENPITFLENKGYHNVRKENILCLPKYSLFELENGRRRLLASAKELQKGNEIVLPVCLTTLLYHSKNLHKLDEPEHLEYIQKHRNEFKDLLNLVSEFSQKYILAEANLEKIKDLYADNEQADIEILANSFINLLTFTALGAPAAFKFFGKDVDRKRYTTVSEILNATLIHQSITGLYETRIDLSKLGEE

SEQ ID NO: 1294 - protein, 1421 aa, Streptococcus sanguinis
MTKFNKNYSIGLDIGVSSVGYAVVTEDYRVPAFKFKVLGNTEKEKIKKNLIGSTTFVSAQPAKGTRVFRVNRRRIDRRNHRITYLRDIFQKEIEKVDKNFYRRLDESFRVLGDKSEDLQIKQPFFGDKELETAYHKKYPTIYHLRKHLADADKNSPVADIREVYMAISHILKYRGHFLTLDKINPNNINMQNSWIDFIESCQEVFDLEISDESKNIADIFKSSENRQEKVKKILPYFQQELLKKDKSIFKQLLQLLFGLKTKFKDCFELEEEPDLNFSKENYDENLENFLGSLEEDFSDVFAKLKVLRDTILLSGMLTYTGATHARFSATMVERYEEHRKDLQRFKFFIKQNLSEQDYLDIFGRKTQNGFDVDKETKGYVGYITNKMVLTNPQKQKTIQQNFYDYISGKITGIEGAEYFLNKISDGTFLRKLRTSDNGAIPNQIHAYELEKIIERQGKDYPFLLENKDKLLSILTFKIPYYVGPLAKGSNSRFAWIKRATSSDILDDNDEDTRNGKIRPWNYQKLINMDETRDAFITNLIGNDIILLNEKVLPKRSLIYEEVMLQNELTRVKYKDKYGKAHFFDSELRQNIINGLFKNNSKRVNAKSLIKYLSDNHKDLNAIEIVSGVEKGKSFNSTLKTYNDLKTIFSEELLDSEIYQKELEEIIKVITVFDDKKSIKNYLTKFFGHLEILDEEKINQLSKLRYSGWGRYSAKLLLDIRDEDTGFNLLQFLRNDEENRNLTKLISDNTLSFEPKIKDIQSKSTIEDDIFDEIKKLAGSPAIKRGILNSIKIVDELVQIIGYPPHNIVIEMARENMTTEEGQKKAKTRKTKLESALKNIENSLLENGKVPHSDEQLQSEKLYLYYLQNGKDMYTLDKTGSPAPLYLDQLDQYEVDHIIPYSFLPIDSIDNKVLTHRENNQQKLNNIPDKETVANMKPFWEKLYNAKLISQTKYQRLTTSERTPDGVLTESMKAGFIERQLVETRQIIKHVARILDNRFSDTKIITLKSQLITNFRNTFHIAKIRELNDYHHAHDAYLAVVVGQTLLKVYPKLAPELIYGHHAHFNRHEENKATLRKHLYSNIMRFFNNPDSKVSKDIWDCNRDLPIIKDVIYNSQINFVKRTMIKKGAFYNQNPVGKFNKQLAANNRYPLKTKALCLDTSIYGGYGPMNSALSIIIIAERFNEKKGKIETVKEFHDIFIIDYEKFNNNPFQFLNDTSENGFLKKNNINRVLGFYRIPKYSLMQKIDGTRMLFESKSNLHKATQFKLTKTQNELFFHMKRLLTKSNLMDLKSKSAIKESQNFILKHKEEFDNISNQLSAFSQKMLGNTTSLKNLIKGYNERKIKEIDIRDETIKYFYDNFIKMFSFVKSGAPKDINDFFDNKCTVARMRPKPDKKLLNATLIHQSITGLYETRIDLSKLGED

SEQ ID NO: 1295 - protein, 317 aa, Streptococcus sp.
FEDSILFSYQVDSKFNRKISDATIYATRKAKLDKEKSEETYVLGKIKDIYSQAGYDAFIKIYNKDKSKFLMYHKDPQTFEKVIEEILRTYPSKELNDKNKEIPCNPFEKYRQENGPIRKYSKKSNGPEIKSLKYYDNKLGNHIDITPESSDNQVVLQSLKPWRTDVYFNHQTKKYELMGLKYSDLSFEKGSGKYSISNQKYNSIKRIEGIDEQSEFKFTLYKNDLILIKDSENNEQKLFRFNSRNDTAKHYIELKPYDKAKFDGEQELITILGNVAKGGRCLKGLNKSNISIFKVKTDVLGKKHIIKKEGDEPKLKF

SEQ ID NO: 1296 - protein, 1420 aa, Streptococcus sp.
MAKFNKNYSIGLDIGVSSVGYAVVTEDYRVPAFKFKVLGNTEKEKIKKNLIGSTTFVPAQSAQGTRVFRVNRRRIDRRNHRIAYLRDIFQKEIEKIDKNFYRRLDESFRVLGDKSEDIQIKQPFFGNKELETAYHKKYPTIYHLRKHLADADKNSPVADIREVYMVLSHILKYRGHFLTLGKIDPNNINMQNSWIDFIESCQDAFDLEISDESKTIAAIFKSSENRQEKVKQILSYFQQELLKKDKSIFKQLLQLLFGLKTKFKDCFELEEEPDLNFSKENYDENLENLLGALEEDFSDVFAKLKILRDTILLSSMLTYTGATHARFSATMVERYEEHRKDLQRFKSFVKQNLSEQDYLDIFGRKTPTGFDVDKETKGYVGYISNKMVLTNPQKQKTIQQNFYDYISGKITGIEGAECFLNKISDGTFLRKLRTTDNGAIPNQIHAYELEKIIERQGRDYPFLLENKDKLLSILTFKIPYYVGPLAKGNNSRFAWIKRTTSQDVLDDNDEDTRNGKIRPWNYHKLINMDETRDAFIINLIGNDIILLNEKVLPKRSLIYEEVMLQNELTRVKYKDKYGKIHFFNSELRQEIINNLFKTNSKRVSSAMLLSYLENFTNLQAVEIVSGIEKGKSLNSTLKTYNDLKTIFSEELLDSEIYQKELEEIIKVITVFDDKKSIKNYLTKYFGHLEFLNEEKINQLSKLRYTGWGRYSGKLLLGIRDEDTGFNLMQFLRNDDENRNLTQLISDTTLSFDSAIKAIQSKSTVEDDVFEEIKNLAGSPAIKRGILNSIKIVDELVQIIGYPPQNIIIEMARENMTTEEGQKKAKTRKSKLESALKNIEDSVLESGKVPHSDEQLQSEKLYLYYLQNGKDMYSLDKTGSPTPLYRDQLDQYEVDHIIPYSFLPIDSIDNKVLTHRENNQRKLNNIPDKETVANMKPFWEKLYNAKLISQTKYQRLTTSERTPDGVLTESMKAGFIERQLVETRQIIKHVARILDNRFSDTKIITLKSQLVTNFRNTFHIAKIRELNDYHHAHDAYLAVVVGQTLLKAYPKLAPELIYGHHAHFNRHEENKATLRKHLYSNIMRFFNNPDSKVSKDIWDCNRDLPIVKDVIYNSQINFVKRTMIKKGAFYNQNPVGKLNKQIAANNRYPLKTKVSSLDTSIYGGYGPMNSALSIIIIAERFNEKKGKIETVKEFHDIFIIDYEKFNNNPFQFLNNVSEEGFLKKNDLNRVLAFYRISKYSLMQKIDGTRMLFESKSNLHKVTQFKLTKTQNELFFHMKRLLTKSNLMDLKSESAIKESQNFIQTHQNEFDNIADRLSNYSQKMLGETKSLQTLINGYNERPIKQIDNNEETIRYYYDNFIKMFSFVKSGAPKDIINFFNDKYTVPRMRPKPDRKMLDATLIHQSITGLYETRIDLSKLGED

SEQ ID NO: 1297 - protein, 1371 aa, Streptococcus sp.
MENKNYSIGLDIGTNSVGWSVITDDYKVPSKKMKVLGNTDKHFIKKNLIGALLFDEGTTAEARRLKRTARRRYTRRKNRLRYLQEIFSEEIGKVDSSFFHRLDDSFLIPEDKRGSKYPIFATLAEEKKYHKQFPTIYHLRKQLADSKEKTDLRLIYLALAHMIKYRGHFLYEEAFDIKNNDIQKIFNEFISIYNNTFEGNSLSGQNVQVEAIFTDKISKSAKRERVLKLFPDEKSTGLFSEFLKLIVGNQADFKKHFDLEEKAPLQFSRDTYDEDLENLLGQIGDDFADLFLVAKKLYDAILLSGILTVTNPSTKAPLSASMIERYENHQKDLASLKQFIKNNLPEKYDEVFSDQSEDGYAGYIDGKTTQETFYKYIKNLLSKFEGADYFLDKIEREDFLRKQRTFDNGSIPHQIHLQEMNAILRRQGEHYPFLKENKEKIEKILTFRIPYYVGPLARGNRDFAWLTRNSDQAIRPWNFEEIVDKASSAEDFINKMTNYDLYLPEEKVLPKHSLLYETFAVYNELTKVKFIAEGLRDYQFLDSGQKKQIVTQLFKEKRKVTEKDIIQFLHNVDGYDGIELKGIEKQFNASLSTYHDLLKIIKDKAFMDDAKNEAILENIVHTLTIFEDREMIKQRLAQYDSLFDEKVIKALTRRHYTGWGKLSAKLINGISDKQTGNTILDYLIDDGEINRNFMQLINDDGLSFKEIIQKAQVVGKTNDVKQVVQELPGSPAIKKGILQSIKIVDELVKVMGHAPESIVIEMARENQTTARGKKNSQQRYKRIEDSLKILASGLNSKILKEHPTDNIQLQNDRLFLYYLQNGKDMYTGEALDINQLSSCDIDHIIPQAFIKDDSLDNRVLTSSKDNRGKSDNVPSLEVVDKMKVFWQQLLDSKLISYRKFNNLTKAERGGLNELDKVGFIKRQLVETRQITKHVAQILDARFNKEVTEKDKKNRTVKIITLKSNLVSNFRKEFELYKVREINDYHHAHDAYLNAVVAKAILKKYPKLEPEFVYGDYQKYDLKRYISRSKDPKEIEKATEKYFFYSNLLNFFKEEVHYADGTIVKRENIEYSKDTGEIAWNKEKDFATIKKVLSLPQVNIVKKREVQTGGFSKESILPKGNSDKLIPRKTKDILWDTTKYGGFDSPVIAYSILLIADIEKGKAKKLKTVKTLVGITIMEKDAFEKNPIAFLENKGYHNVCKENILCLPKYSLFELENGRRRLLASAKELQKCNEIVLPVYLTTLLYHSKNVHKLDEPGHLEYIQKHRNEFKDLLNLVSEFSQKYVLADANLEKIKNLYADNEQADIEILANSFINLLTFTALGAPAAFKFFGKDVDRKRYTTVSEILNATLIHQSITGLYETRIDLSKLGED

SEQ ID NO: 1298 - protein, 93 aa, Streptococcus sp.
MILIKDSENNEQKLFRFNSRNDTAKHYVELKPYDKARFDGQQELITILGNVAKGGQCLKGLNKSNISIFKVKTDVLGKKHIIKKEGDEPKLKF

SEQ ID NO: 1299 - protein, 1121 aa, Streptococcus sp.
MNGLVLGLDIGIASVGVGILEKNSGKIIHANSRLFPAATADNNVERRKNRQARRLHRRKKHRGVRFQDLFEDYGLLTDFSKVSINLNPYRLRVDGLNQQLTNEELFIALKNIVKRRGISYLDDASEDGGTVSSDYGKAVEENRKLLAEQTPGQIQLERFEKYGQVRGDFTVVENGEKRRLINVFSTSAYRKEAERILRKQQEFNSKITDEFIEDCLKILTGKRKYYHGPGNEKSRTDYGRFRTDGTTLDNIFGILIGKCTFYPDEYRASKASYTAQEFNLLNDLNNLTVPTETKKLSEEQKKVIVEYAKEAKTLGASTLLKYIAKMIDASVDQIRGYRVDVNNKPEIHTFEAYRKMQSLETISVGELSRNVLDELAHILTLNTEREGIEEAINTKLKDSFSQDQVLELVQFRKNNSSLFSKGWHNFSLKLMMELIPELYETSEEQMTILTRLGKQKSKEISKRTKYIDEKELTEEIYNPVVAKSVRQAIKIINEATKKHGIFDNIVIEMARENNEEDAKKDYIKRQKANQDEKNAAMEKAAFQYNGKKELPDSIFHGQKELATKIRLWHQQGEKCLYTGKNIPISDLIHNQYKYEIDHILPLSLSFDDSLSNKVLVLATANQEKGQRTPFQALDSMDDAWSYREFKSYVKESKLLGNKKKEYLLTEEDISKIEVKQKFIERNLIDTRYSSRVVLNALQDFYKAHKFDTTISVVRGQFTSQLRRKWGLEKSRETYHHHAVDALIIAASSQLRLWKKQNNPLIAYKEGQFVDSETGEIISLSDDEYKELVFKAPYDHFVDTLSSKTFEDSILFSYQVDSKFNRKISDATIYATRKAKLDKEKSEETYVLGKIKDIYSQAGYDAFIKIYNKDKSKFLMYHKDPQTFEKVIEEILRTYPSKELNDKNKEIPCNPFEKYRQENGPIRKYSKKSNGPEIKSLKYYDNKLGNHIDITPESSDNQVVLQSLKPWRTDVYFNHQTKKYELMGLKYSDLSFEKGSGKYSISNQKYNSIKRIEGIDEQSEFKFTLYKNDLILIKDSENNEQKLFRFNSRNDTAKHYIELKPYDKAKFDGEQELITILGNVAKGGRCLKGLNKSNISIFKVKTDVLGKKHIIKKEGDEPKLKF

SEQ ID NO: 1300 - protein, 1026 aa, Streptococcus sp.
MNGLVLGLDIGIASVGVGILEKNSGKIIHANSRLFPAATADNNVERRKNRQARRLNRRKKHRGVRFQDLFEDYGLLTDFSKVSINLNPYRLRVDGLNQQLTNEELFIALKNIVKRRGISYLDDASEDGGAVSSDYGKAVEENRKLLAEQTPGQIQLERFEKYGQVRGDFTVVENGEKRRLINVFSTSAYRKEAEKILRKQQEFNNQITDEFIEDYLKILTGKRKYYHGPGNEKSRTDYGRFRTDGTTLDNIFGVLIGKCTFYPNEYRASKSSYTAQEFNLLNDLNNLTVPTETKKLSEEQKKVIVEYAKEAKTLGASTLLKYIVKMIDASVDQISGYRVDVNNKPEMHTFEVYRKMQSLETISVGELSRNVLDELAHILTLNTEREGIEEAINSKLMGVFSQDQVLELVQFRKNNSSLFSKGWHNFSLKLMMELIPELYETSEEQMTILTRLGKQKSKETSKRTKYIDEKELTEEIYNPVVAKSVRQAIKIINEATKKHGIFDNIVIEMARENNEEDAKKDYIKRQKANQDEKNAAMEKAAFQYNGKKELPGNIFNGHKELATKIRLWHQQGEKCLYTGKTIPISDLIHNQYKYEIDHILPLSLSFDDSLSNKVLVHATANQEKGQRTPFQALDSMDDAWSYREFKSYVKDLKSLSNKKKDYLLTEEDISKIEVKQKFIERNLVDTRYSSRVVLNALQDFYKSHQFDTTISVVRGQFTSQLRRKWGLEKSRETYHHHAVDALIIAASSQLRLWKKQNNPLITYKEGQFIDSQTGEIISLTDDEYKELVFKAPYDHFVDTLHSKTFEDGILFSYQVDSKYNRKISDATIYATRKAKLDKDKSEETYVLGKIKDIYSQAGYDAFIKIYNKDKRKFLMYHKDPQTFEKVIEEILRTYPSKERNDKNKEVPCNPFEKYRQENGPIRKYSKKGNGPEIKCLKYYDNKLGNYIDISPDGSDNQVVLQSLKPWRTDVYFNHQTKKYELMGLKYSDLSFEKGSGKYSISNEKYNSIKRIEGVNEQSEFKFTLYK

SEQ ID NO: 1301 - protein, 1377 aa, Streptococcus sp.
MNNKPYSIGLDIGTNSVGWSVITDDYKVPSKKMKVLGNTDKRFIKKNLIGALLFDEGTTAEARRLKRTARRRYTRRKNRLRYLQEIFAEEMSKVDSSFFHRLDDSFLIPEDKRGSKYPIFATLVEEKEYHKQFPTIYHLRKQLADSKEKADLRLIYLVLAHMIKYRGHFLYEEAFDIKNNDIQKIFNEFISIYDNTFEGSSLSGQNAQVETIFTDKISKSAKRERVLKLFPDEKSTGLFSEFLKLIVGNQADFKKHFDLEEKAPLQFSKDTYDEDLENLLEQIGDDFADLFVAAKKLYDAILLSGILTVTDPSTKAPLSASMIERYENHQKDLAVLKQFIKTNLPEKYVEVFSDQSKDGYAGYIDGKTTQEAFYKYIKNLLSKFDGADYFLDKIEREVFLRKQRTFDNGSIPHQIHLQEMNTILRRQGEHYPFLKENKEKIEKILTFRIPYHVGPLARGNRDFAWLTRNSDQAIRPWNFEEIVDKASSAEDFINKMTNYDLYLPEEKVLPKHSLLYETFAVYNELTKVKFIAEGMRDYQFLDSGQKKKIINQLFKKKRKVTEDDIIDCLQKIDNYDGIELKGIEKQFNASLSTYHDILKIIRDKEFMDDPKNGDILENVIHTLTIFEDREMIKQRLAQYNSIFDEKVIKALSRKHYTGWGKLSAKLIDGIRDKQTGKTILDYLMDDGKSNRNFMQLIKDDELSFTEIIQKAQVVGDTDNLRQVVQNLPGSPAIKKGILQSIKIVDELVKVMGHAPESIVIEMARENQTTARGKKNSQQRYKRIEDSLKNLASGLDSNILKENPTDNIQLQNDRLFLYYLQNGKDMYTGEALNINQLSSYDIDHIIPQAFIKDDSLDNRVLTSSKDNRGKSDNVPSLEVVEKMKAFWQQLLDSKLISERKYNNLTKAERERGGLNELDKVGFIKRQLVETRQITKHVAQILDARFNKEVTEKNKKNRNVKIITLKSNMVSNFRKEFGLYKVREINDYHHAHDAYLNAVVAKAILKKYPKLEPEFVYGDYQKYDLKRYISRSKDPKEVEKATEKYFFYSNLLNFFKEEVHYADGTIVKRENIEYSKDTGEIAWNKEKDFATIKKVLSLPQVNIVKKTEEQTVGQNGGLFDNNIVSKKKVVDASKLIPIKSGLSPEKYGGYARPTIAYSVLVTYKQNNKIKNTMVGIPVLTKLEFERDPNLYLRNLGINNVSHVIKLVKYTVLEFKHKYGTYRRFIVSNQELKRANQIFVTTKQMKLISQYTTLDKNEHDSLLKNNQQLIQSIWNQFLEFMLATDLVNKKQYDELILTNNQTIEECRNIMNRVITTLSFTNINAGQKKIIFDDTLSLPIKRWQFTDSDKMVKKIIESTLIHQSITGLYETRIDLSKLGED

SEQ ID NO: 1302 - protein, 1371 aa, Streptococcus sp.
MNNNNYSIGLDIGTNSVGWAVITDDYKVPSKKMRVLGNTDKRFIKKNLIGALLFDEGTTAEDRRLKRTARRRYTRRKNRLRYLQEIFAEEMSKVDSSFFHRLDDSFLVPEDKSGSKYPIFATLAEEKEYHKKFPTIYHLRKHLADSKEKADLRLIYLALAHITKYRGHFLYEEAFDIKNNDIQKIFNEFINIYDNTFEGSSLSGQNAQVEAIFTGKISKSVKREHVLKLFPDEKSTGLFSEFLKLIVGNQADFKKHFDLEEKASLQFSKDTYDEDLENLLGQIGDDFADLFLVAKKLYDAILLSGILTVTDPSTKAPLSASMIERYENHQEDLAALKQFIKNNLPEKYAEVFSDQSKDGYAGYIDGKTTQEAFYKYIKNLLSKFEGADYFLDKIEREDFLRKQRTFDNGSIPHQIHLQEMNAILRRQGEHYPLLKENKEKIEKILTFRIPYYVGPLARGNRDFAWLTRNSDQAIRPWNFEEIVDKASSAESFINKMTNYDLYLPEEKVLPKHSLLYETFAVYNELTKVKFIAEGLRDYQFFDSGQKKQIVNQLFKEKRKVTEKDIIHYLHNVDGYDGIELKGIEKQFNASLSTYHDLLKIIKDKEFMDNHKNQEILENIVHTLTIFEDREMIKQRLAQYDSIFDEKVIKALTRRHYTGWGKLSAKLINGICDKKTGKTILDYLIDDGYNNRNFMQLINDDGLSFKEIIQKAQVVGKTDDLTQVVRELSGSPAIKKGILQSIKIVDELVKIMGYAPESIVIEMARENQTTAKGKKNSQQRYKRIEDALKNLAPGLDSTISKENPTDNIQLQNDRLFLYYLQNGKDMYTGEALDINQLSSYDIDHIIPQAFIKDDSLDNRVLTSSKDNRGKSDNVPSLEVVKKRKAFWQQLLDSKLISERKFNNLTKAERGGLDERDKVGFIKRQLVETRQITKHVARILDARFNTEVSEKNQKIRSVKIITLKSNLVSNFRKEFKLYKVREINDYHHAHDAYLNAVVAKAILKKYPKLEPEFVYGDYQKYDLKRYISKSKDPKEVEKATEKYFFYSNLLNFFKEEVHYADGTIVKRENIEYSKDTGEIAWNKEKDFVTIKKVLSYPQVNIVKKREVQTGGFSKESILPKGNSDKLIPRKTKDILWDTTKYGGFDSPVIAYSILLIADIEKGKAKKLKTVKTLVGITIMEKAAFEKNPITFLENKGYHNVRKENILCLPKYSLFELENGRRRLLASAKELQKGNEIVLPVYLTTLLYHSKNVHKLDEPEHLEYIQKHRYEFKDLLNLVSEFSQKYVLAEANLEKIKSLYVDNEQADIEILANSFINLLTFTALGAPAAFKFFGKDVDRKRYTTVSEILNATLIHQSITGLYETRIDLSKLGED

SEQ ID NO: 1303 - protein, 1139 aa, Streptococcus sp.
MSDLVLGLDIGIGSVGVGILNKVTGEIIHKNSRIFPAAQAENNLERRTNRQGRRLTRRKKHRRVRLNHLFEESGLITDFTKVSINLNPYQLRVKGLTAELSNEELFIALKNMVKHRGISYLDDASDDGNSSVGDYAQIVKENSKQLETKTPGQIQLERYQKYGQLRGDFTVEEDGRKHRLINVFPTSAYHAEALRILQTQQEFNPQITDEFINSYLEILTGKRKYYHGPGNEKSRTDYGKYTTKKDAQGQYITLNNIFGILIGKCTFYPEEYRAAKASYTAQEFNLLNDLNNLTVPTETKKLSEEQKYQIITYVKNEKAMGPAKLFKYIAKLLSCDVADIKGYRIDKSDKAEIHTFEAYRKMKTLETLDVKKMAREELDKLAYVLTLNTEREGIQEALDHEFADGTFSQEQVDELVQFRKANSSIFGKGWHSFSVKLMMELIPELYATSEEQMTILTRLGKQKTTSSSNKTKYIDEKQLTEEIYNPVVAKSVRQAIKIVNAAIKKYGDFDNIVIEMARETNEDDEKKAIQKIQKANKAEKDAAMRKAANQYNGKAELPHSVFHGHKQLATKIRLWHQQGERCLYTGKTISIHDLINNPNQFEIDHILPLSITFDDSLANKVLVYATANQEKGQRTPYQALDSMDDAWSFRELKAFVRESKALSNKKKEYLLTEEDISKFDVRKKFIERNLVDTRYASRVVLNALQEHFRTHKIDTKVSVVRGQFTSQLRRHWGIEKTRDTYHHHAVDALIIAASSQLNLWKKQKNTLVSYSEDQLLDIETGELISDDEYKESVFKAPYQHFVDTLKSKEFEDSILFSYQVDSKFNRKISDATIYATRKAKLDKEKKEYTYTLGKIKDIYALGTKTPSKTGFYKFLDLYKKDKSQFLMYQKDRRTWDEVIEKILEQYRPFKEKDKNGKEVDFNPFEKYRIENGPIRKYSRKGNGPEIKSLKYYDNLLGRFVDITPSESKNPVALLSLNPWRTDVYYNTETRKYEFLGLKYADLCFEKGGSYGISKVKYNKIREKEGIGKNSEFKFTLYKNDLILIKDTETNRQQIFRFWSRTGKDNPKSFEKHKLELKPYEKTRFEKGEELKVLGKVPPSSNRLQKNMQIENLSIYKVRTDVLGNQHIIKNEGDKPKLDF

SEQ ID NO: 1304 - protein, 1375 aa, Streptococcus sp.
MSNKSYSIGLDIGTNSVGWAVITDDYKVPSKKMKVLGNTDKHFIKKNLIGALLFDEGTTAEDRRLKRTARRRYTRRKNRLRYLQEIFSQEISKVDSSFFHRLDDFFLVPEDKRGSKYPIFATLVEEKEYHKKFPTIYHLRKHLADSKEKTDLRLIYLALAHMIKYRGHFLYEESFDIKNNDIQKIFSEFISIYDNTFEGKSLSGQNAQVEAIFTDKISKSTKRERVLKLFPDEKSTGLFSEFLKLIVGNQADFKKHFDLEEKAPLQFSKDTYDEDLENLLGQIGDDFADLFLVAKKLYDAILLSGILTVKDLSTKAPLSASMIERYENHQKDLAALKQFIQNNLQEKYDEVFSDQSKDGYAGYIDGKTTQEAFYKYIKNLLSKFEGADYFLDKIEREDFLKKQRTFDNGSIPHQIHLQEMNAIIRRQGEHYPFLQENKEKIEKILTFRIPYYVGPLARGNGDFAWLTRNSDQAIRPWNFEEIVDQASSAEDFINKMTNYDLYLPEEKVLPKHSLLYETFAVYNELTKVKFIAEGLTRYQFLDKKQKKDIFDTFFKAENKRKVTEKDIIHYLHNVDGYDGIELKGIEKQFNASLSTYHDLLKIIKDKAFMDDSKNEEILENIIHTLTIFEDREMIKQRLAQYDSLFDEKVIKALTRRHYTGWGKLSAKLINGIRDKKSGKTILDYLIDDGEINRNFMQLIHDDGLSFKEIIQKAQVFGKTNDVKQVVQELPGSPAIKKGILQSIKIVDELVKVMGHAPESIVIEMARENQTTARGKKNSQQRYKRIEDSLKNLASGLDSNILKENPTDNIQLQNDRLFLYYLQNGRDMYTGKPLEINQLSNYDIDHIIPQAFIKDDSLDNRVLTSSKDNRGKSDNVPSLEVVEKMKAFWQQLLDSKLISERKFNNLTKAERERGGLNELDKVGFIKRQLVETRQITKHVAQFLDARFNKEVTEKDKKNRNVKIITLKSNLVSNFRKEFGLYKVREINDYHHAHDAYLNAVLAKAILKKYPKLEPEFVYGDYQKYDLQRYISKSREPKEVEKATQKYFFYSNLLNFFKEEVHYADGTIVKRENIEYSKDTGEIAWNKEKDFATVKKVLSLPQVNIVKKTEVQTGGFSKESILPKGNSDKLIPRKTKEILWDTTKYGGFDSPVIAYSILLIADIEKGKAKKLKTVKTLVGITIMEKATFEKNPITFLENKGYHNVRKENILCLPKYSLFELESGRRRMLASAKELQKGNEIVLPVYLTTLLYHSKNVHKLDEPEHLEYIQKHRYEFKDLLNLVSEFSQKYVLADANLEKIKNLYADNEQADIEILANSFINLLTFTALGAPAAFKFLGKDVDRKRYTTVSEILNATLIHQSITGLYETRIDLSKLGED

SEQ ID NO: 1305 - protein, 206 aa, Streptococcus sp.
RTPFQALDSMDDAWSYREFKSYVKESKLLGNKKKEYLLTEEDISKIEVKQKFIERNLIDTRYSSRVVLNALQDFYKAHKFDTTISVVRGQFTSQLRRKWGLEKSRETYHHHAVDALIIAASSQLRLWKKQNNPLIAYKEGQFVDSETGEIISLSDDEYKELVFKAPYDHFVDTLSSKTFEDSILFSYQVDSKFNRKISDATIYATR

SEQ ID NO: 1306 - protein, 1122 aa, Streptococcus suis
MSNGKILGLDIGIASVGVGVIDAQTGEIIHASSRIFPSANAANNAERRTFRGSRRLIRRKKHRIKRLDDLFNDFHINLDGEMSTDNPYVLRVKGLSQKLTVEELYISIKNIMKRRGISYLDDAESDNEAGRSDYAKAIERNRQLLTSKTPGEIQLERLEKYGQLRGNFTIIDEEGQSQQIINVFSTSDYVKEVEKILDCQKMYHKFISDEFCDKLIELLREKRKYYVGPGNEKSRTDYGIYRTDGTTLENLFGILIGKCTFYPDQYRSSRASYTAQEFNFLNDLNNLTVPTETKKLSQEQKEFLVNYAKETSVLGAGKILQQIAKLADCKVEDIRGYRLDNKDKPELHTFETYRAMKGLVPLVDIGVLSREQLDILADILTLNTDFEGIREALKKQLPNVFDEKQVKGLASFRKSKSQLFAKGWHNLSQKIMLEVIPELYATSDEQMTILTRLGKFEKSSVAEYPSSINVDEITDEIYNPVVAKSIRQTIKIINASIKKWDEFDQIVIEMPRDRNEDEEKKRIADGQKANAKEKADSILRAAELYCAGKVLPDYVYNGHNQLATKIRLWYQQGERCIYTGQPISIHDLIHNQNQYEIDHILPLSLTFDDSLSNKVLVLATANQEKAQRTPYNYLKSATSAWSYREFKDYVTKRKGIGKKKCEYLTFEEDINGFEVRSKFIQRNLVDTRYASKVILNALQDYFKISGIQTKVSVVRGQFTSQLRHKWGIEKTRETYHHHAVDALIIAASSQLRLWKKQESPLVVDYQEGRQVDLETGEILELTDEQYKELVYQPPYQGFVNTISSSAFDNEILFSYQVDSKVNRKISDATIYATRNAQLGKDKTEGIYVLGKIKDIYTQAGYEAFLKRYTKDKTSFLMYHKDLDTWEKVIEIILRDYREYDEKGKEIGNPFERYRRENGYVKKYSRKGNGTAIKSLKYYDNKLGNHIDITPENSRNAVVLQSLKPWRTDVYFNKETGKYEFLGIKYSDLSFEKGTGEYGISQEKYDSIKIAEGVAKKSIFKFTLYKQDLLFIKDIENNFGKLLRFTSKNDTSKHYVELKPYDKNKFGTEEPLLPVLGNVAKSGQCIKGLNKSNISIYKVRTDILGYRHFIKQEGEHPQLKFKK

SEQ ID NO: 1307 - protein, 1381 aa, Streptococcus suis
MVKKKYAIGIDIGTNSVGWSIVTDDYKVPSKKMKVFGNTEKRYIKKNLLGTLLFDEGNTAENRRLKRTARRRYTRRRNRILYLQEIFAEEINKIDDSFFQRLDDSFLIVEDKQGSKHPIFGTLQEEKEYHKQFPTIYHLRKQLADSSQKADIRLIYLALAHIIKYRGHFLFEGDLKSENKDVQHLFNDFVEMFDKTVEGSYLSENLPNVADVLVEKVSKSRRLENILHYFPNEKKNGLFGNFLALALGLQPNFKTNFELAEDAKIQFSKETYEEDLEELLGKIGDDYADLFIATKSLYDGILLAGILSTTDSTTKAPLSSSMVNRYEEHQKDLALLKNFIHQNLSDSYKEVFNDKLKDGYAGYIEGKTTQENFYRFIKKAIEKIEGSNYFIDKIDREDFLRKQRTFDNGSIPHQIHLQEMHAIIRRQAEFYPFLVENQDKIEKILTFRIPYYVGPLARGKSEFAWLNRKSDEKIRPWNFDEMVDKETSAENFITRMTNYDRYLPDQKVLPKHSLLYEKFAVYNELTKVKFIAEGMRDYQFLDSGQKKDIVKTLFKTKRKVTAKDIKAYLENSNGYAGVELKGLEEQFNASLPTYHDLLKILRDKAFIDAEENQEILEDIVLTLTLFEDREMIRKRLEKYKDILTEEQRKKLERRHYTGWGRLSAKLINGILDKVTRKTILGYLIDDGTSNRNFMQLINDDTLSFVDEIRLAQGSGEAEDYRAEVQNLAGSPAIKKGILQSLKIVDELIEVMGYEPEHIVVEMARENQFTNQGRRNSQQRINRLENALKDFGSKILEEQKPYGVSKVNNIHLQSDRLFLYYLQNGKDMYTDEELDIDHLSEYDIDHIIPQAFIKDDSLDNKVLTKSAKNRGKSDDVPSMEIVHNRKNFWRQLLKSKLISQRKFDNLTKAERGGLTNEDKARFIQRQLVETRQITKHVARMLDTRFNTKLDEAGNRIRDPKVNIITLKSNLVSQFRKDYQLYKIREINNYHHAHDAYINAVVATALLKKYPQLAPEFVYGEYPTYNSYNSRKSATEKVLFYSNIMNFFKRIVVHSKTGEVRIRPVIEVNKETGEIVWDKKSDFRTVRKVLSYPQVNVVKKTEVQNHGLDRGKPKGFYNANLSPRPKEGSVENLVPAKQSFDTKRYGGYAGISNSYAVLVNGIIEKGKKKSKAEVTEFQGISILARKDFDKNPKQYLLNLGYKDIKSIIKLPKYSLFELENGSRRMLASILSTNNKRGEIHKGNEMYLPDKFVTLLYHAMRVNRTLEPGHKKYVETHRHVFDELLIYILEYNEKIVGAKANGKRIVEAYSARKDTDNLEELCNSFINLLNLTALGSAVDFEFLGTKIPRYRDYTPSSLLKATLIHQSVTGLYETRIDLSKLGGD

SEQ ID NO: 1308 - protein, 39 aa, Streptococcus thermophilus
GRCIKGLGKSNISIYKVRTDVLGNQHIIKNEGDKPKLDF

SEQ ID NO: 1309 - protein, 302 aa, Streptococcus thermophilus
MIRRKKHRIVRLNRLFEESGLITDFTKISINLNPYQLRVKGLTDELSNEELFIALKNMVKHRGISYLDDASDDGNSSVGDYAQIVKENSKQLETKTPGQIQLERYQTYGQLRGDFTVEKDGKKHRLINVFPTSAYRSEALRILQTQQEFNPQITDEFINRYLEILTGKRKYYHGPGNEKSRTDYGRYRTSGETLDNIFGILIGKCTFYPDEFRAAKASYTAQEFNLLNDLNNLTVPTETKKLSKEQKNQIINYVKNEKAMGPAKLFKYIAKLLSCDVADIKGYRIDKSGKAERFILSKPIEK

SEQ ID NO: 1310 - protein, 1121 aa, Streptococcus thermophilus
MSDLVLGLDIGIGSVGVGILNKVTGEIIHKNSRIFPAAQAENNLVRRTNRQGRRLTRRKKHRIVRLNRLFEESGLITDFTKISINLNPYQLRVKGLTDELSNEELFIALKNMVKHRGISYLDDASDDGNSSVGDYAQIVKENSKQLETKTPGQIQLERYQTYGQLRGDFTVEKDGKKHRLINVFPTSAYRSEALRILQTQQEFNPQITDEFINRYLEILTGKRKYYHGPGNEKSRTDYGRYRTSGETLDNIFGILIGKCTFYPDEFRAAKASYTAQEFNLLNDLNNLTVPTETKKLSKEQKNQIINYVKNEKAMGPAKLFKYIAKLLSCDVADIKGYRIDKSGKAEIHTFEAYRKMKTLETLDIEQMDRETLDKLAYVLTLNTEREGIQEALEHEFADGSFSQKQVDELVQFRKANSSIFGKGWHNFSVKLMMELIPELYETSEEQMTILTRLGKQKTTSSSNKTKYIDEKLLTEEIYNPVVAKSVRQAIKIVNAAIKEYGDFDNIVIEMARETNEDDEKKAIQKIQKANKDEKDAAMLKAANQYNGKAELPHSVFHGHKQLATKIRLWHQQGERCLYTGKTISIHDLINNSNQFEVDHILPLSITFDDSLANKVLVYATANQEKGQRTPYQALDSMDDAWSFRELKAFVRESKTLSNKKKEYLLTEEDISKFDVRKKFIERNLVDTRYASRVVLNALQEHFRAHKIDTKVSVVRGQFTSQLRRHWGIEKTRDTYHHHAVDALIIAASSQLNLWKKQKNTLVSYSEDQLLDIETGELISDDEYKESVFKAPYQHFVDTLKSKEFEDSILFSYQVDSKFNRKISDATIYATRQAKVGKDKADETYVLGKIKDIYTQDGYDAFMKIYKKDKSKFLMYRHDPQTFEKVIEPILENYPNKQMNEKGKEVPCNPFLKYKEEHGYIRKYSKKGNGPEIKSLKYYDSKLGNHIDITPKDSNNKVVLQSVSPWRADIYFNNTTGKYEILGLKYADLQFEKGTGTYKISQEKYNDIKKKEGVDSDSEFKFTLYKNDLLLVKETETKEQQLFRFLSRTMPKQKHYVELKPYDKQKFEGGEALIKVLGNVANGGQCIKGLGKSNISIYKVRTDVLGNQHIIKNEGDKPKLDF

SEQ ID NO: 1311 - protein, 1121 aa, Streptococcus thermophilus
MSDLVLGLDIGIGSVGVGILNKVTGEIIHKNSRIFPAAQAENNLVRRTNRQGRRLTRRKKHRIVRLNRLFEESGLITDFTKISINLNPYQLRVKGLTDELSNEELFIALKNMVKHRGISYLDDASDDGNSSVGDYAQIVKENSKQLETKTPGQIQLERYQTYGQLRGDFTVEKDGKKHRLINVFPTSAYRSEALRILQTQQEFNPQITDEFINRYLEILTGKRKYYHGPGNEKSRTDYGRYRTSGETLDNIFGILIGKCTFYPDEFRAAKASYTAQEFNLLNDLNNLTVPTETKKLSKEQKNQIINYVKNEKAMGPAKLFKYIAKLLSCDVADIKEYRIDKSGKAEIHTFEAYRKMKTLETLDIEQMDRETLDKLAYVLTLNTEREGIQEALEHEFADGSFSQKQVDELVQFRKANSSIFGKGWHNFSVKLMMELIPELYETSEEQMTILTRLGKQKTTSSSNKTKYIDEKLLTEEIYNPVVAKSVRQAIKIVNAAIKEYGDFDNIVIEMARETNEDDEKKAIQKIQKANKDEKDAAMLKAANQYNGKAELPHSVFHGHKQLATKIRLWHQQGERCLYTGKTISIHDLINNSNQFEVDHILPLSITFDDSLANKVLVYATANQEKGQRTPYQALDSMDDAWSFRELKAFVRESKTLSNKKKEYLLTEEDISKFDVRKKFIERNLVDTRYASRVVLNALQEHFRAHKIDTKVSVVRGQFTSQLRRHWGIEKTRDTYHHHAVDALIIAASIQLNLWKKQKNTLVSYSEDQLLDIETGELISDDEYKESVFKAPYQHFVDTLKSKEFEDSILFSYQVDSKFNRKISDATIYATRQAKVGKDKADETYVLGKIKDIYTQDGYDAFMKIYKKDKSKFLMYRHDPQTFEKVIEPILENYPNKQINEKGKEVPVNPFLKYKEEHGYIRKYSKKGNGPEIKSLKYYDSKLGNHIDITPKDSNNKVVLQSVSPWRADVYFNKTTGKYEILGLKYADLQFEKGTGTYKISQEKYNDIKKKEGVDSDSEFKFTLYKNDLLLVKDTETKEQQLFRFLSRTMPKQKHYVELKPYDKQKFEGGEALIKVLGNVANSGQCKKGLGKSNISIYKVRTDVLGNQHIIKNEGDKPKLDF

SEQ ID NO: 1312 - protein, 1121 aa, Streptococcus thermophilus
MSDLVLGLDIGIGSVGVGILNKVTGEIIHKNSRIFPAAQAENNLVRRTNRQGRRLTRRKKHRRVRLNRLFEESGLITDFTKISINLNPYQLRVKGLTDELSNEELFIALKNMVKHRGISYLDDASDDGNSSVGDYAQIVKENSKQLETKTPGQIQLERYQTYGQLRGDFTVEKDGKKHRLINVFPTSAYRSEALRILQTQQEFNPQITDEFVNRYLEILTGKRKYYHGPGNEKSRTDYGRYRTNGETLDNIFGILIGKCTFYPEEFRAAKASYTAQEFNLLNDLNNLTVPTETKKLSKEQKNQIINYVKNEKAMGPAKLFKYIAKLLSCDVADIKGYRIDKSGKAEIHTFEAYRKMKTLETLDIEQMDRETLDKLAYVLTLNTEREGIQEALEHEFADGSFSQKQVDELVQFRKANSSIFGKGWHNFSVKLMMELIPELYETSEEQMTILKRLGKQKTTSSSNKTKYIDEKLLTEEIYNPVVAKSIRQAIKIVNAAIKEYGDFDNIVIEMARETNEDDEKKAIQKIQKANKDEKDAAMLKAANQYNGKAELPHSVFHGHKQLATKIRLWHQQGERCLYTGKTISIHDLINNPNQFEVDHILPLSITFDDSLANKVLVYATANQEKGQRTPYQALDSMDDAWSFRELKAFVRESKTLSNKKKEYLLTEEDISKFDVRKKFIERNLVDTRYASRVVLNALQEHFRAHKIDTKVSVVRGQFTSQLRRHWGIEKTRDTYHHHAVDALIIAASSQLNLWKKQKNTLVSYSEDQLLDIETGELISDDEYKESVFKAPYQHFVDTLKSKEFEDSILFSYQVDSKFNRKISDATIYATRQAKVGKDKKDETYVLGKIKDIYTQDGYDAFMKIYKKDKSKFLMYRHDPQTFEKVIEPILENYPNKEMNEKGKEVPCNPFLKYKEEHGYIRKYSKKGNDPEIKSLKYYDSKLGNHIDITPKDSNNKVVLQSVSPWRADVYFNKTTGKYEILGLKYADLQFEKGTGTYKISQEKYNDIKKKEGVDSDSEFKFTLYKNDLLLVKDTETKEQQLFRFLSRTMPKQKHYVELKPYDKQKFEGGEALIKVLGNVANSGQCKKGLGKSNISIYKVRTDVLGNQHIIKNEGDKPKLDF

SEQ ID NO: 1313 - protein, 1122 aa, Streptococcus thermophilus
MSDLVLGLDIGIGSVGVGILNKVTGEIIHKNSRIFPAAQAENNVERRTNRQGRRLTRRKKHRRVRLNRLFEESGLITDFTKISINLNPYQLRVRGLTDELSNEELFIALKNMVKHRGISYLDDASDDGNSSVGDYAQIVKENSKQLETKTPGQIQLERYQTYGQLRGDFTVEKDGKKHRLINVFPTSAYRSEALRILQTQQEFNSQITDEFINRYLEILTGKRKYYHGPGNEKSRTDYGRYRTSGETLDNIFGILIGKCTFYPEEFRAAKASYTAQEFNLLNDLNNLTVPTETKKLSKEQKNQIINYVKNEKAMGPAKLFKYIAKLLSCDVADIKGYRIDKSGKAEIHTFEAYRKMKTLETLDIEQMDRETLDKLAYVLTLNTEREGIQEALEHEFADGSFSQKQVDELVQFRKASSSIFGKGWHNFSVKLMMELIPELYETSEEQMTILTRLGKQKTTSSSNKTKYIDEKLLTEEIYNPVVAKSVRQAIKIVNAAIKEYGDFDNIVIEMARETNEDDEKKAIQKIQKANKDEKDAAMLKAANQYNGKAELPHSVFHGHKQLATKIRLWHQQGERCLYTGKTISIHDLINNPNQFEVDHILPLSITFDDSLANKVLVYATANQEKGQRTPYQALDSMDDAWSFRELKAFVRESKTLSNKKKEYLLTEEDISKFDVRKKFIERNLVDTRYASRVVLNALQEHFRAHKIDTKVSVVRGQFTSQLRRHWGIEKTRDTYHHHAVDALIIAASSQLNLWKKQKNTLVSYSEDQLLDIETGELISDDEYKESVFKAPYQHFVDTLKSKEFEDSILFSYQVDSKFNRKLSDATIYATRQAKVGKDKKDETYVLGKIKDIYTQDGYDAFMKIYKKDKSKFLMYRHDPQTFEKVIEPILENYPNKEMNEKGKEVPCNPFLKYKEEHGYIRKYSKKGNGPEIKSLKYYDSKLLGNPIDITPENSKNKVVLQSLKPWRADVYFNKTTGKYEILGLKYADLQFEKKTGTYKISQEKYNGIMKEEGVDSDSEFKFTLYKNDLLLVKDTETKEQQLFRFLSRTMPNVKYYVELKPYSKDKFEKNESLIEILGSADKSGRCIKGLGKSNISIYKVRTDVLGNQHIIKNEGDKPKLDF

SEQ ID NO: 1314 - protein, 1388 aa, Streptococcus thermophilus
MTKPYSIGLDIGTNSVGWAVITDNYKVPSKKMKVLGNTSKKYIKKNLLGVLLFDSGITAEGRRLKRTARRRYTRRRNRILYLQEIFSTEMATLDDAFFQRLDDSFLVPDDKRDSKYPIFGNLVEEKAYHDEFPTIYHLRKYLADSTKKADLRLVYLALAHMIKYRGHFLIEGEFNSKNNDIQKNFQDFLDTYNAIFESDLSLENSKQLEEIVKDKISKLEKKDRILKLFPGEKNSGIFSEFLKLIVGNQADFRKCFNLDEKASLHFSKESYDEDLETLLGYIGDDYSDVFLKAKKLYDAILLSGFLTVTDNETEAPLSSAMIKRYNEHKEDLALLKEYIRNISLKTYNEVFKDDTKNGYAGYIDGKTNQEDFYVYLKNLLAEFEGADYFLEKIDREDFLRKQRTFDNGSIPYQIHLQEMRAILDKQAKFYPFLAKNKERIEKILTFRIPYYVGPLARGNSDFAWSIRKRNEKITPWNFEDVIDKESSAEAFINRMTSFDLYLPEEKVLPKHSLLYETFNVYNELTKVRFIAESMRDYQFLDSKQKKDIVRLYFKDKRKVTDKDIIEYLHAIYGYDGIELKGIEKQFNSSLSTYHDLLNIINDKEFLDDSSNEAIIEEIIHTLTIFEDREMIKQRLSKFENIFDKSVLKKLSRRHYTGWGKLSAKLINGIRDEKSGNTILDYLIDDGISNRNFMQLIHDDALSFKKKIQKAQIIGDEDKGNIKEVVKSLPGSPAIKKGILQSIKIVDELVKVMGGRKPESIVVEMARENQYTNQGKSNSQQRLKRLEKSLKELGSKILKENIPAKLSKIDNNALQNDRLYLYYLQNGKDMYTGDDLDIDRLSNYDIDHIIPQAFLKDNSIDNKVLVSSASNRGKSDDFPSLEVVKKRKTFWYQLLKSKLISQRKFDNLTKAERGGLLPEDKAGFIQRQLVETRQITKHVARLLDEKFNNKKDENNRAVRTVKIITLKSTLVSQFRKDFELYKVCEINDFHHAHDAYLNAVIASALLKKYPKLEPEFVYGDYPKYNSFRERKSATEKVYFYSNIMNIFKKSISLADGRVIERPLIEVNEETGESVWNKESDLATVRRVLSYPQVNVVKKVEEQNHGLDRGKPKGLFNANLSSKPKPNSNENLVGAKEYLDPKKYGGYAGISNSFAVLVKGTIEKGAKKKITNVLEFQGISILDRINYRKDKLNFLLEKGYKDIELIIELPKYSLFELSDGSRRMLASILSTNNKRGEIHKGNQIFLSQKFVKLLYHAKRISNTINENHRKYVENHKKEFEELFYYILEFNENYVGAKKNGKLLNSAFQSWQNHSIDELCSSFIGPTGSERKGLFELTSRGSAADFEFLGVKIPRYRDYTPSSLLKDATLIHQSVTGLYETRIDLAKLGEG

SEQ ID NO: 1315 - protein, 1388 aa, Streptococcus thermophilus
MTKPYSIGLDIGTNSVGWAVITDNYKVPSKKMKVLGNTSKKYIKKNLLGVLLFDSGITAEGRRLKRTARRRYTRRRNRILYLQEIFSTEMATLDDAFFQRLDDSFLVPDDKRDSKYPIFGNLVEEKAYHDEFPTIYHLRKYLADSTKKADLRLVYLALAHMIKYRGHFLIEGEFNSKNNDIQKNFQDFLDTYNAIFESDLSLENSKQLEEIVKDKISKLEKKDRILKLFPGEKNSGIFSEFLKLIVGNQADFRKCFNLDEKASLHFSKESYDEDLETLLGYIGDDYSDVFLKAKKLYDAILLSGFLTVTDNETEAPLSSAMIKRYNEHKEDLALLKEYIRNISLKTYNEVFKDDTKNGYAGYIDGKTNQEDFYVYLKNLLAEFEGADYFLEKIDREDFLRKQRTFDNGSIPYQIHLQEMRAILDKQAKFYPFLAKNKERIEKILTFRIPYYVGPLARGNSDFAWSIRKRNEKITPWNFEDVIDKESSAEAFINRMTSFDLYLPEEKVLPKHSLLYETFNVYNELTKVRFIAESMRDYQFLDSKQKKDIVRLYFKDKRKVTDKDIIEYLHAIYGYDGIELKGIEKQFNSSLSTYHDLLNIINDKEFLDDSSNEAIIEEIIHTLTIFEDREMIKQRLSKFENIFDKSVLKKLSRRHYTGWGKLSAKLINGIRDEKSGNTILDYLIDDGISNRNFMQLIHDDALSFKKKIQKAQIIGDEDKGNIKEVVKSLPGSPAIKKGILQSIKIVDELVKVMGGRKPESIVVEMARENQYTNQGKSNSQQRLKRLEKSLKELGSKILKENIPAKLSKIDNNALQNDRLYLYYLQNGKDMYTGDDLDIDRLSNYDIDHIIPQAFLKDNSIDNKVLVSSASNRGKSDDFPSLEVVKKRKTFWYQLLKSKLISQRKFDNLTKAERGGLLPEDKAGFIQRQLVETRQITKHVARLLDEKFNNKKDENNRAVRTVKIITLKSTLVSQFRKDFELYKVREINDFHHAHDAYLNAVIASALLKKYPKLEPEFVYGDYPKYNSFRERKSATEKVYFYSNIMNIFKKSISLADGRVIERPLIEVNEETGESVWNKESDLATVRRVLSYPQVNVVKKVEEQNHGLDRGKPKGLFNANLSSKPKPNSNENLVGAKEYLDPKKYGGYAGISNSFAVLVKGTIEKGAKKKITNVLEFQGISILDRINYRKDKLNFLLEKGYKDIELIIELPKYSLFELSDGSRRMLASILSTNNKRGEIHKGNQIFLSQKFVKLLYHAKRISNTINENHRKYVENHKKEFEELFYYILEFNENYVGAKKNGKLLNSAFQSWQNHSIDELCSSFIGPTGSERKGLFELTSRGSAADFEFLGVKIPRYRDYTPSSLLKDATLIHQSVTGLYETRIDLAKLGEG

SEQ ID NO: 1316 - protein, 595 aa, Streptococcus thermophilus
MVQFRKANSSIFGKGWHNFSVKLMMELIPELYETSEEQMTILKRLGKQKTTSSSNKTKYIDEKLLTEEIYNPVVAKSVRQAIKIVNAAIKEYGDFDNIVIEMARETNEDDEKKAIQKIQKANKDEKDAAMLKAANQYNGKAELPHSVFHGHKQLATKIRLWHQQGERCLYTGKTISIHDLINNPNQFEVDHILPLSITFDDSLANKVLVYATANQEKGQRTPYQALDSMDDAWSFRELKAFVRESKTLSNKKKEYLLTEEDISKFDVRKKFIERNLVDTRYASRVVLNALQEHFRAHKIDTKVSVVRGQFTSQLRRHWGIEKTRDTYHHHAVDALIIAASSQLNLWKKQKNTLVSYSEDQFLDIETGELISDDEYKESVFKAPYQHFVDTLKSKEFEDSILFSYQVDSKFNRKISDATIYATRKAKLDKEKKEYTYTLGKIKDIYTQAGYDAFIKIYKKDKSKFLMYHHDPQTFEKVIEPILENYPNKEINEKGKEVPCNPFLKYKEEHGYIRKYSKKGNGPEIKSFKYYDNLLGRHIDITPKNSKNIVALRKLNPWRTDVYFNHETMKYEFLGLKYADISYKKSKNKAGDFLPK

SEQ ID NO: 1317 - protein, 1388 aa, Streptococcus thermophilus
MTKPYSIGLDIGTNSVGWAVITDNYKVPSKKMKVLGNTSKKYIKKNLLGVLLFDSGITAEGRRLKRTARRRYTRRRNRILYLQEIFSTEMATLDDAFFQRLDDSFLVPDDKRDSKYPIFGNLVEEKVYHDEFPTIYHLRKYLADSTKKADLRLVYLALAHMIKYRGHFLIEGEFNSKNNDIQKNFQDFLDTYNAIFESDLSLENSKQLEEIVKDKISKLEKKDRILKLFPGEKNSGIFSEFLKLIVGNQADFRKCFNLDEKASLHFSKESYDEDLETLLGYIGDDYSDVFLKAKKLYDAILLSGFLTVTDNETEAPLSSAMIKRYNEHKEDLALLKEYIRNISLKTYNEVFKDDTKNGYAGYIDGKTNQEDFYVYLKNLLAEFEGADYFLEKIDREDFLRKQRTFDNGSIPYQIHLQEMRAILDKQAKFYPFLAKNKERIEKILTFRIPYYVGPLARGNSDFAWSIRKRNEKITPWNFEDVIDKESSAEAFINRMTSFDLYLPEEKVLPKHSLLYETFNVYNELTKVRFIAESMRDYQFLDSKQKKDIVRLYFKDKRKVTDKDIIEYLHAIYGYDGIELKGIEKQFNSSLSTYHDLLNIINDKEFLDDSSNEAIIEEIIHTLTIFEDREMIKQRLSKFENIFDKSVLKKLSRRHYTGWGKLSAKLINGIRDEKSGNTILDYLIDDGISNRNFMQLIHDDALSFKKKIQKAQIIGDEDKGNIKEVVKSLPGSPAIKKGILQSIKIVDELVKVMGGRKPESIVVEMARENQYTNQGKSNSQQRLKRLEKSLKELGSKILKENIPAKLSKIDNNALQNDRLYLYYLQNGKDMYTGDDLDIDRLSNYDIDHIIPQAFLKDNSIDNKVLVSSASNRGKSDDFPSLEVVKKRKTFWYQLLKSKLISQRKFDNLTKAERGGLLPEDKAGFIQRQLVETRQITKHVARLLDEKFNNKKDENNRAVRTVKIITLKSTLVSQFRKDFELYKVREINDFHHAHDAYLNAVIASALLKKYPKLEPEFVYGDYPKYNSFRERKSATEKVYFYSNIMNIFKKSISLADGRVIERPLIEVNEETGESVWNKESDLATVRRVLSYPQVNVVKKVEEQNHGLDRGKPKGLFNANLSSKPKPNSNENLVGAKEYLDPKKYGGYAGISNSFAVLVKGTIEKGAKKKITNVLEFQGISILDRINYRKDKLNFLLEKGYKDIELIIELPKYSLFELSDGSRRMLASILSTNNKRGEIHKGNQIFLSQKFVKLLYHAKRISNTINENHRKYVENHKKEFEELFYYILEFNENYVGAKKNGKLLNSAFQSWQNHSIDELCSSFIGPTGSERKGLFELTSRGSAADFEFLGVKIPRYRDYTPSSLLKDATLIHQSVTGLYETRIDLAKLGEG

SEQ ID NO: 1318 - protein, 1038 aa, Streptococcus vestibularis
MIDELSNEELFIALKNMVKHRGISYLDDASDDGNSSVGDYAQIVKENSKQLETKTPGQIQLERYQKYGQLRGDFTVEEDGKKHRLINVFPTSAYRAEALRILQTQQEFNSQITDEFINRYLEILTGKRKYYHGPGNEKSRTDYGRYRTSGETLDNIFGILIGKCTFYPEEFRAAKASYTAQEFNLLNDLNNLTVPTETKKLSEEQKNQIINYVKNEKAMGPAKLFKYIAKLLSCDIADIKGYRIDKSDKAEIHTFEAYRKMKTLETIDIEKMSREELDKLAYVLTLNTEREGIQEALEHEFVDGNFSQEQIDELVQFRKANSSIFGKGWHNFSVKLMMELIPELYATSEEQMTILTRLGKQKTTSSSNKTKYIDEKLLTEEIYNPVVAKSVRQAIKIVNAAIKEYGDFDNIVIEMARATNEDDEKKAIQKIQKANKDEKDAAMLKAANQYNGKAELPHSVFHGHKQLATKIRLWHQQGERCLYTGKTISIHDLINNPNQFEIDHILPLSITFDDSLANKVLVYATANQEKGQRTPYQALDSMDDAWSFRELKAFVRESKTLSNKKKEYLLTEEDISKFDVRKKFIERNLVDTRYASRVVLNALQEHFRAHKIDTKVSVVRGQFTSQLRRHWGIEKTRDTYHHHAVDALIIAASSQLNLWKKQKNTLVNYSENQLLDIETGELISDDEYKESVFKAPYQHFVDTLKSKEFEDSILFSYQVDSKFNRKISDATIYATRKAKLDKEKKEYTYTLGKIKDIYALGTKTPSKTGFYKFLDLYKKNKSQFLMYQKDRKTWDEVIEKILEQYRPFKEKDKNGKEVDFNPFEKYRIENGPIRKYSRKGNGPEIKSLKYYDNLLGRFVDITPSESKNPVALLSLNPWRTDVYYNTETRKYEFLGLKYADLCFEKGGSYGISKVKYNKIREKEGIGKNSEFKFTLYKNDLILIKDTETNRQQVFRFWSRTGKDNPKRFEKHKIELKPYEKARFEKGEELEVLGKVPPSSNQLQKNMQIENLSIFKVRTDVLGNQHIIKNEGDKPKLDF

SEQ ID NO: 1319 - protein, 97 aa, Streptococcus vestibularis
MSDLVLGLDIGIGSVGVGILNKVTGEIIHKNSRIFPAAQAENNVERRTNRQGRRLTRRKKHRRVRLNHLFEESGLITDFTKVSINLNPYQLRVKIDR

SEQ ID NO: 1320 - protein, 1084 aa, Subdoligranulum sp.
MKNTLYGIGLDIGVASVGWAVVGLNGTGEPVGLHRLGVRIFDKAEQPKTGESLAAPRRMARGMRRRLRRKALRRADVYALLERSGLSTREELAQMFEAGGLEDIYALRTRALDEPVGKAEFSRILLHLAQRRGFKSNRRTASDGEDGRLLAAVNENRRRMAQGGWRTVGEMLYRHEAFALHKRNKADDYLSTVGRDMVAEEASILFERQRAMGCSWAAPELQAEYLSILLRQRSFDEGPGGNSPYGGNQVEKMVGRCTFEPDEPRAAKAAYSFEYFSLLQKLNHIRLAENGETRPLTQPQRQQLLSLAHKTPDISLARIRKELALPETVQFNGVRCRANETLEESEKKEKFACLPAYHKMRKALDGVVKGRISSLSISQRDAAATALSLYKNEDTLRAKLTEAGFQAPEIDALAGLTGFSKFGHLSLKACRKLIPHLEQGLTYDQACTAAGYDFKGHGAGERAFTLPAAAPEMEQITSPVVRRAVAQTIKVVNGIIREMDASPAWVRIELARELSKTFGERQEMDRSMRENAAQNERLMQELRDTFHLLSPTGQDLVKYRLWKEQDGVCAYSLRRLDVERLFEPGYVDVDHIVPYSLSFDDRRSNKVLVLSSENRQKGNRLPLQYLQGKRREDFIVWTNSSVHDYRKRQNLLREKLSGDEAEGFRQRNLQDTQHMARFLYNYISDHLAFAQSEALGKKRVFAVSGAVTSHLRKRWGLSKVRADGDLHHALDAAVVACTTDGMIRRISGYYGHIEGEYLQDADGAGSQHARTKERFPAPWPRFRDELIVRLSEQPAEPLLDINPEFYCEYGTEHIRPVFVSRMPRRKVTGPGHKETIKGAAAADEGLLTVRKALTELKLDKDGEIKDYYMPSSDTLLYEALKAQLRRFGGDGKKAFAEPFYKPKADGTPGPLVRKVKTTEKATLTVPVHGGAASNDTMVRVDVFLVPGDGYYWVPVYTADTLKPELPNRAVVQGKPYSEWKEMREEDFIFSLYPNDLVYVEHKSGLKFTLQNADSTLEKTRTQTSAFAYFVSGSISTASITIRTHDNAYGIPSLGVKTLKTFHKYQVDVLGNVFPVHKETRQKFR

SEQ ID NO: 1321 - protein, 951 aa, Sutterella parvirubra
MPTVRPVFHSSASFDLGAKNTGLFLVNHPAGAAPSAEYAAAYTIVQPADGDGLNYSTTNRRAVRHRLRGGKRFKLARRLVLQVIDALRKLKPGLIRDEEMRRTVEALSSLLKRRGFTRIESEAQVDPTTLDSVDPAVFADHETLGGFFSLGIPISTQWDALSQNPGAVEQLFKALPSAKDFGKYVTEQFPEFAEQKKLYADAIKVLSSEAKSIVMQLGLGHHHRSKYFEMIAHDMLRDPRLQGVFELFGSEERFKTFICNVSNLQLRALRWYFDEPNPEVANQWNPEKFQVVWLRGLKYFHPDAERKADMKKLIDELTASKDILDALCTTDPRRTIPPYEDQNNRRPPFDQTLWLSAAELTRRYGDKWRIWSQKFERADRALSTGLDEILLYTDRRSRMFNRNQDPSVYADSYVLQRVLDRSSKLDRYALRALAAGYRTQELHEPLATLSDTLGTQHVETFLTFAAEYYEEVAAAKNGLWLDGPSRLLERADIHPPMKKKVLDLLLGNILDATPEIGRILRTVLWNRHVHEKSRSTPASLCRSIEAIRKDFGGEFRMRYDALDAKIRAAEDQKKKFKPTNAEEKDLFKAWNATKTMHAFLRDVLQLTPKQLERTASPYVFAQLHTLIDTERDGFTSTSLAAHLENHWRMRANAAGMAQCSRLPADAVRPFDGVLSKALDRQAFEAAKLAAQHLMSRKELTDTDIRYSIIIESNRFAFSASTAELKKNTLAKKNAEKGLNFELKRWQDKDSRIREASRGICAYTGAKLGDVVEYDHIIPRAFTTSAMGSVFNSEANLICVSRPGNQTKADKRYGLNKLHKTYLTAVFGTADVTTIAASIEDIVGKLASANRLRHFELLNEKEQDAVRHALFLDDESDARRIVLRELAAQNKSRVNGTQAWFVRAFMTKLLEITKDWRERTGNTLDIRSWKTDAEVASRLRSALNFHAEITLT

SEQ ID NO: 1322 - protein, 406 aa, Sutterella parvirubra
SNLFREEVPYGDHFLPIIQMKNRIYIGYQLPKADGTGGNAVAVLGKDPLELLETLKPFLDREPQAFSDHPVTYKMINERAYELLTKCALTPDQTTELERTQAEVLRSLNYQTSRAAVLGRLVDDKNKFVAKDAVWKEKDFVISFKLSPKKSAFKASGQLELPAKSDWKALVDSPELAINWGQPADDTFSQRIERKVRMNSSHLEHTPKKRVVSLPVVDKPSGGFRIRRHNLDGSAVFQVHTVANNKYGGFSADSAGKVDWSTPVLCGHLQHANLVPLDPETASAEQLVRMSEWRVVETTSDIRLEVCPGTSGRRYVRVELPFTLLQEWLTAGKVADVPVSPLHLPGSIKLTDPKTFCAEAQKTLSIFAQPRATIFFEQLGDRVRFRFEASGGPATMNAAYNAAGRS

SEQ ID NO: 1323 - protein, 389 aa, Sutterella wadsworthensis
MKACDLEEKTNHLQACVAIDLGARYTGTFSILHKSSHLPSKDDCRAATYVLPEDGGKMTYSQRNRTAVRHRIRGKKRFALARRMAMLIIREKLAAKSVTLTSSETRRLAEAVGSLLRRRGYNRLETETDNDLTVLENIEPEVFSEHEILGKYFYAGTDLAIQWETLSQDLSKISSLLAERLSEKDFKKYLTGLIPDDKNKIKHIISVFKMLIDEAESINMQCVLGHKHRTQYLSDIHADMHRDTRLSKAAEAFGGVDRLWRLLGNLSNLQLRAHRWYFNAPHLFDDQALEPARLQKTLVRAFKYLHCPQGVESRAQAELVKELEEADDIIDALCTIDPVRTIPPYENQQNRRPPFDQTLYLSPDLGVSGFLCLGRLFQGQPNEAALCFL

SEQ ID NO: 1324 - protein, 976 aa, Tannerella sp.
MKKILGLDLGSNSIGWALVNEAENRDEASSIIKLGVRVNPLTVDEMQNFEKGKSITTNADRTLKRSMRRNLQRYKLRRDALIKLLKKVGFITDGTILSEQGNRTTFETYRLRAKAPDEEISLQELARVLLMINKKRGYKSSRKIKEKEAGTLIDGMEVAKKLYDEDLTPGQLCLQLLESGKKSLPDFYSSDLQEEFDRIWNFQKQFNPKAFCDTAKEEIKGKNKSQTWAILAKYFIWMEEMDVWNEKESKTERVEKECKLVGLKRTVKKEEQRKENYCWRVQALTEQLDLEKVAVVLQEINGQISTSSGYLGAISDRSKVLYFNRQTVGQYQMAELEKNPNTSLRNMVFYRQDYLDEFDKIWEKQAEFHKELTVELKKEIRDIIIFYQRRLKSQKGLIGFCEFENREIMVEKNGKMQAKVVGCKVIPRSHPLFQEFKIWQTLNNVEVFAGEKKCKRKRTDAFPGLFDGTEDTLMVEGWRYLYQEEKEILAKELSVKKSLKKEYILKLLFDNPQDLDMNFEQIEGNDTGNVLFSAYSKMIEKYGYEPLDFGKPTDKIIEQLQVIFADLGWNTDLLFVDLNKEGKDLEKQPYFKLWHLLYSFEGDNTPTGNGKLVEKLMELCHVGKECALELVNISFQNDYGSLSAKAIKKILPYLKEGNRYDVACGYAGYRHSKSSLTKEEIENKVLKDKLDILPKNSLRNPVVEKILNQMVNVINAIIDTYGKPDEIRVELARELKKSAKEREELTKAIAKSTREHEEIRKVLQEEFGMINVSRNDIIRYKLYKELKDNGYKTLYSNQDIPKEKVFSKEIDIEHIIPQARLFDDSLSNKTLEYKAINIEKGNKTAYDFVKEKYGEKGLQQYLNRCESLFKGHRTKLRKLKMGQENIPEGFIDRDLRNTQYIAKKALAMLNEICRRVVATTGSITDRLREDWQLVDVLKELRCFRYFKDTKMKANHNKNIFYTSIKVDVSDTSKILK

SEQ ID NO: 1325 - protein, 1049 aa, Tistrella mobilis
MINERLTFGIDLGIGSCGWAVLRHADAAGEPGVIEGLGSWCFDVPETSKERIPTNQVRRSNRLLRRVIRRRRNRMAEIRRLFHAQGLLPSADEDALKRPRLDPWELRARGLDQCLSAEEFAVALGHIARHRGFRSSAKRKAANTSGEDSKMLSALLVTRERTARYRTVGEMFARDPEYSARRRNRDGIFDRTVARDDLIHEVGKLFEAQRARGSAFASPDLEADFNAIAFRQAEMQDSERLVGNCPFERDEKRAARWAPSFERFRLLTRLINLRIATAEGERRFTPEDLARVSAELGATAKLPVSRVRALIGLLPDERFTTIRVEDEDRDIVARTGEAAPGTWRLRKTLGEALWAEMQARPDQLDAIAHVLSFFEATAKIRSELDRLGLPAAVIEALDRGLEDGAFAKFKGAGHISAKACRNLLPHLQQGHRYDQACRLAGYDHAASTLSHTAQVVSKAGFNALVTELGESIANPIARKALTEGLKQIRAMCARWGLPGAIHIELAREVGNSIEKRRELESQRETTTKRRQTERDEIRGLLALEDVDDDTLLRYRLWKEQGGKCLYTGKDIHVRQLIATDNSVQVDHILPWSRFGDDSFNNKTLCLASANQRKRGQTPWEWFSLTGTPEAWEVFASRVETSKDLRGFKKRNLLLKNADEVAQRFRSRNLNDTRYAARLLAEAAKLFYPAGDRQEKDGRRRVLTRPGPLTAALRHAWGLESLKKADGKRVSDDRHHALDALAVAAISEREVQRLTRSFQEWEQQGLARPLRHVAPPWPGFRGDVLAAYAQAFVARPERRRARGKGHDASIRQVVGEGPEAQVFERRGLADLKEADLDRVKDPERNQAIIEAVRAWILAGRPADAPPRSPRGDVIVKLRTAPAKKIKPAVPVRGGTADRGDMVRIDVFTRPNRKGRDEWYLVPIYPHQVMNRKAWPHPPMRSVVAYKDEAGWTEIGAEHSFRFSLYPRSYVQLVKSNGDVIEGYLVSMDRSTGAFRVFVHNNPAEMAKGIGAKTLLNLRKFNVDRFGVRTEVKSEVRTWHGEVCTSPVPPD

SEQ ID NO: 1326 - protein, 1395 aa, Treponema denticola
MKKEIKDYFLGLDVGTGSVGWAVTDTDYKLLKANRKDLWGMRCFETAETAEVRRLHRGARRRIERRKKRIKLLQELFSQEIAKIDEGFFQRMKESPFYAEDKTILQENALFNDKDFTDKTYHKAYPTINHLIKAWIENKVKPDPRLLYLACHNIIKKRGHFLFEGDFDSENQFDTSIQALFEYLREDMEVDIDADSQKVKEILKDSSLKNSEKQSRLNKILGLKPSDKQKKAITNLISGNKINFADLYDNPDLKDAEKNSISFSKDDFDALSDDLASILGDSFELLLKAKAVYNCSVLSKVIGDEQYLSFAKVKIYEKHKTDLTKLKAVIKKHFPNNYKKVFGYNQDNESKNNYSGYVGVCKTKNKKLVINNSVNQEDFYKFLKPILSAKSEIKEVNDILAEIETGNFLPKQISKSNAEIPYQLRKMELEKILSNAEKHFSFLKQKDEKGLSHSEKIIMLLTFKIPYYIGPINDNHKKSFPDRCWVVKKEKSPSGKTTPWNFFDHIDKEKTAEEFITSRTNFCTYLIGESVLPKNSLLYSEYTVLNEINNLQIIIDGKNICDTKLKQKIYEDLFKKYKKITQKQISTFIKHEGICNKTDEVIILGIDKECTSSLKSYIELKNIFGKQVDEISTKNMLEEIIRWATIYDEGEGKTILKTKIKAEYGKYCSDEQIKKILNLKFSGWGRLSRKFLETVTSEMPGFSEPVNIITAMRETQNNLMELLSSEFKFTENIKKINSGFEDAEKQFSYDGLVKPLFLSPSVKKMLWQTLKLVKEISHITQAPPKKIFIEMAKGAELEPARTKTRLKILQDLYSSCKNDADAFSSEIQYLSGKIENEDNLRLRSDKLYLYYTQLGKCMYCGKPIEIGHVFDTSNYDIDHIYPQSKIKDDSISNRVLVCSSCNKNKEDKYPLKSEIQSKQRGFWNFLQRNNFISLEKLNRLTRTTPISDDETAKFIARQLVETRQATKVAAKVLEKMFPETKIVYSKAETVSMFRNKFDIIKCREINDFHHAHDAYLNIVVGNVYNTKFTNNPWNFIKEKRDNPKIADTYNYYKVFDYDVKRNNITAWEKGKTIITVKDMLKRNTPIYTRQAACKKGGLFDQTIMKKGLGQHPLKKEGPFSNISKYGGYNKVSAAYYTLIEYEEKGNKIRSLETIPLYLVKDIQKDQDVLKSYLTDLLGKKEFKILVPKIKINSLLKINGFPCHITGKTNDSFLLRPAVQFCCSNDEVLYFKKIIRFSEIRSQREKIGKTISPYEDLSFRSYIKENLCKKTKNDEIGEKEFYDLLQKKNLEIYDMLLTKHKDTIYKKRPNSATIDILVKGKEKFKSLIIENQFEVILEILKLFSATRNVSELQHIGGSKYSGVAKIGNKISSLDNCILIYQSITGIFEKRIDLLKV

SEQ ID NO: 1327 - protein, 769 aa, Treponema denticola
MKKEIKDYFLGLDVGTGSVGWAVTDTDYKLLKANRKDLWGMRCFETAETAEVRRLHRGARRRIERRKKRIKLLQELFSQEIAKIDEGFFQRMKESPFYAEDKTILQENALFNDKDFTDKTYHKAYPTINHLIKAWIENKVKPDPRLLYLACHNIIKKRGHFLFEGDFDSENQFDTSIQALFEYLREDMEVDIDADSQKVKEILKDSSLKNSEKQSRLNKILGLKPSDKQKKAITNLISGNKINFADLYDNPDLKDAEKNSISFSKDDFDALSDDLASILGDSFELLLKAKAVYNCSVLSKVIGDEQYLSFAKVKIYEKHKTDLTKLKAVIKKHFPNNYKKVFGYNQDNESKNNYSGYVGVCKTKNKKLVINNSVNQEDFYKFLKPILSAKSEIKEVNDILAEIETGNFLPKQISKSNAEIPYQLRKMELEKILSNAEKHFSFLKQKDEKGLSHSEKIIMLLTFKIPYYIGPINDNHKKSFPDRCWVVKKEKSPSGKTTPWNFFDHIDKEKTAEEFITSRTNFCTYLIGESVLPKNSLLYSEYTVLNEINNLQIIIDGKNICDTKLKQKIYEDLFKKYKKITQKQISTFIKHEGICNKTDEVIILGIDKECTSSLKSYIELKNIFGKQVDEISTKNMLEEIIRWATIYDEGEGKTILKTKIKAEYGKYCSDEQIKKILNLKFSGWGRLSRKFLETVTSEMPGFSEPVNIITAMRETQNNLMELLSSEFKFTENIKKINSGFEDAEKQFSYDGLVKPLFLSPSVKKCCGRL

SEQ ID NO: 1328 - protein, 1395 aa, Treponema denticola
MKKEIKDYFLGLDVGTGSVGWAVTDTDYKLLKANRKDLWGMRCFETAETAEVRRLHRGARRRIERRKKRIKLLQELFSQEIAKIDEGFFQRMKESPFYAEDKTILQENALFNDKDFTDKTYHKAYPTINHLIKAWIENKVKPDPRLLYLACHNIIKKRGHFLFEGDFDSENQFDTSIQALFEYLREDMEVDIDADSQKVKEILKDSSLKNSEKQSRLNKILGLKPSDKQKKAITNLISGNKINFADLYDNPDLKDAEKNSISFSKDDFDALSDDLASILGDSFELLLKAKAVYNCSVLSKVIGDEQYLSFAKVKIYEKHKTDLTKLKAVIKKHFPNNYKKVFGYNQDNESKNNYSGYVGVCKTKNKKLVINNSVNQEDFYKFLKPILSAKSEIKEVNDILAEIETGNFLPKQISKSNAEIPYQLRKMELEKILSNAEKHFSFLKQKDEKGLSHSEKIIMLLTFKIPYYIGPINDNHKKSFPDRCWVVKKEKSPSGKTTPWNFFDHIDKEKTAEEFITSRTNFCTYLIGESVLPKNSLLYSEYTVLNEINNLQIIIDGKNICDTKLKQKIYEDLFKKYKKITQKQISTFIKHEGICNKTDEVIILGIDKECTSSLKSYIELKNIFGKQVDEISTKNMLEEIIRWATIYDEGEGKTILKTKIKAEYGKYCSDEQIKKILNLKFSGWGRLSRKFLETVTSEMPGFSEPVNIITAMRETQNNLMELLSSEFKFTENIKKINSGFEDAEKQFSYDGLVKPLFLSPSVKKMLWQTLKLVKEISHITQAPPKKIFIEMAKGAELEPARTKTRLKILQDLYSSCKNDADAFSSEIQYLSGKIENEDNLRLRSDKLYLYYTQLGKCMYCGKPIEIGHVFDTSNYDIDHIYPQSKIKDDSISNRVLVCSSCNKNKEDKYPLKSEIQSKQRGFWNFLQRNNFISLEKLNRLTRTTPISDDETAKFIARQLVETRQATKVAAKVLEKMFPETKIVYSKAETVSMFRNKFDIIKCREINDFHHAHDAYLNIVVGNVYNTKFTNNPWNFIKEKRDNPKIADTYNYYKVFDYDVKRNNITAWEKGKTIITVKDMLKRNTPIYTRQAACKKGELFNQTIMKKGLGQHPLKKEGPFSNISKYGGYNKVSAAYYTLIEYEEKVNKIRSLETIPLYLVKDIQKDQDVLKSYLTDLLGKKEIKILVPKIKINSLLKINGFPCHITGKTGDSFVLRPAVQFCCSNDEVLYFKKIIRFNEIRSQREKMGKTISPYEDLSFRSYIKENLCKKTKADEIGEKEFYDLLQKKNLEIYDMLLTKHKDTIYNKRPNSTTLGMLTKGRYEFINLKPKDQIIVMLEILKLFCTTREAIDLGLIKGKPAAGVATLGKKISNLDNCILIYQSITGIFEKRIDLLKV

SEQ ID NO: 1329 - protein, 1395 aa, Treponema denticola
MKKEIKDYFLGLDVGTGSVGWAVTDTDYKLLKANRKDLWGMRCFETAETAEVRRLHRGARRRIERRKKRIKLLQELFSQEIAKIDEGFFQRMKESPFYAEDKTILQENTLFNDKDFTDKTYHKAYPTINHLIKAWIENKVKPDPRLLYLACHNIIKKRGHFLFEGDFDSENQFDTSIQALFEYLREDMEVDIDADSQKVKEILKDSSLKNSEKQSRLNKILGLKPSDKQKKAITNLISGNKINFADLYDNPDLKDAEKNSISFSKDDFDALSDDLASILGDSFELLLKAKAVYNCSVLSKVIGDEQYLSFAKVKIYEKHKTDLTKLKNVIKKHFPKDYKKVFGYNKNEKNNNNYSGYVGVCKTKSKKLIINNSVNQEDFYKFLKTILSAKSEIKEVNDILTEIETGTFLPKQISKSNAEIPYQLRKMELEKILSNAEKHFSFLKQKDEKGLSHSEKIIMLLTFKIPYYIGPINDNHKKSFPDRCWVIKKEKSPSGKTTPWNFFDHIDKDKTAEAFITSRTNFCTYLVGESVLPKSSLLYSEYTVLNEINNLQIIIDGKNICDIKLKQKIYEELFKKYKKITQKQISTFIKHEGICNKTDEVIILGIDKECTSSLKSYIELKNIFGKQVDEISTKNMLEEIIRWATIYDEGEGKTILKTKIKAEYGKYCSDEQIKKILNLKFSGWGRLSRKFLETVTSEMPGFSEPVNIITAMRETQNNLMELLSSEFKFTENIKKINSGFEDAEKQFSYNGLVKPLFLSPSVKKMLWQTLKLVKEISHITQAPPKKIFIEMAKGAELEPARTKTRLKILQDLYNNCKNDADAFSSEIKDLSGKIENEDNLRLRSDKLYLYYTQLGKCMYCGKPIEIGHVFDTSNYDIDHIYPQSKIKDDSISNRVLVCSSCNKNKEDKYPLKSEIQSKQRGFWNFLQRNNFISLEKLNRLTRTTPISDDETAKFIARQLVETRQATKVAAKVLEKMFPETKIVYSKAETVSMFRNKFDIIKCREINDFHHAHDAYLNIVVGNVYNTKFTNNPWNFIKEKRDNPKIADTYNYYKVFDYDVKRNNITAWEKGKTIITVKDMLKRNTPIYTRQAACKKGGLFDQTIMKKGLGQHPLKKEGAFSNISKYGGYNKVSAAYYTLIEYEEKGNKIRSLETIPLYLVKDIQKDQDVLKSYLTDLLGKKEIKILVPKIKINSLLKINGFPCHITGKTGDSFVLRPAVQFCCSNDEVLYFKKIIRFNEIRSQREKMGKTISPYEDLSFRSYIKENLCKKTKADEIGEKEFYDLLQKKNLEIYDMLLTKHKDTIYNKRPNSTTLGMLTKGRYEFINLKPKDQIIVMLEILKLFCTTREAIDLGLIKGKPAAGVATLGKKISNPDNCILIYQSITGIFEKRIDLLKV

SEQ ID NO: 1330 - protein, 1395 aa, Treponema denticola
MKKEIKDYFLGLDVGTGSVGWAVTDTDYKLLKANRKDLWGMRCFETAETAEVRRLHRGARRRIERRKKRIKLLQELFSQEIAKIDEGFFQRMKESPLYAEDKTILQENTLFNDKDFTDKTYHKAYPTINHLIKAWIENKVKPDPRLLYLACHNIIKKRGHFLFEGDFDSENQFDTSIQALFEYLREDMELDIDADSQKVKEILKDSSLKNSEKQSRLNKMLGLKPSDKQKKAITNLISGNKINFADLYDNPDLKDAEKNSISFSKDDFDALSDDLASILGDSFELLLKAKAVYNCSVLSKVIGDEQYLSFAKVKIYEKHKTDLTKLKNVIKKHFPKDYKKVFGYNKNEKNNNNYSAYVGVCKITHKKLVIKNSASQEDFYKFLKTILSAKSEIKEVNDILTEIETGTFLPKQISKSNAEIPYQLRKMELEKILSNAEKHFSFLKQKDEKGLSHSEKIIMLLTFKIPYYIGPINDNHKKSFPDRCWVVKKEKSPSGKTTPWNFFDHIDKEKTAEEFITSRTNFCTYLIGESVLPKSSLLYSEYTVLNEINNLQIIIDGKNICDIKLKQKIYEELFKKYKKITQKQISTFIKHEGICNKTDEVIILGIDKECTSSLKSYIELKNIFGKQVDEISTKNMLEEIIRWATIYDEGEGKTILKTKIKAEYGKYCSDEQIKKILNLKFSGWGRLSRKFLETVTSEMPGFSEPVNIITAMRETQNNLMELLSSEFKFTENIKKINSGFEDAEKQFSYNGLVKPLFLSPSVKKMLWQTLKLVKEISHITQAPPKKIFIEMAKGAELEPARTKTRLKILQDLYSSCKNDADAFSSEIQYLSGKIENEDNLRLRSDKLYLYYTQLGKCMYCGKPIEIGHVFDTSNYDIDHIYPQSKIKDDSISNRVLVCSSCNKNKEDKYPLKAEIQSKQRGFWNFLQRNNFISLEKLNRLTRTSPISDDETAKFIARQLVETRQATKVAAKVLEKMFPETKIVYSKAETVSMFRNKFDIIKCREINDFHHAHDAYLNIVVGNVYNTKFTNNPWNFIKEKRDNPKIADTYNYYKVFDYDVKRNNITAWEKGKTIITVKDMLKRNTPIYTRQAACKKGELFNQTIMKKGLGQHPLKKEGPLSNISKYGGYNKVSAAYYTLIEYEEKGSKIRSLETIPLYLVKDIQKNKDGLKSYLTDQIGKKEIKILIPKIKINSLLKINGFPCHITGKMGEAFVLRPAVQFCCSNDEALYFKKIIRFNEIRKQREKMGKTISPYEDLSFRSYIKDNLCKKTKADEIEEKEFYDLLQKKNLEIYDMLLTKHKDTIYKKRPNSATIDILVKGKEKFKSLIIENQFEVILEILKLFSATRNVSDLQHIGGSKNAGNARVGNKISSLDNCILIYQSITGIFEKRIDLLKI

SEQ ID NO: 1331 - protein, 1395 aa, Treponema denticola
MKKEIKDYFLGLDVGTGSVGWAVTDTDYKLLKANRKDLWGMRCFETAETAEVRRLHRGARRRIERRKKRIKLLQELFSQEIAKIDEGFFQRMKESPLYAEDKTILQENTLFNDKDFTDKTYHKAYPTINHLIKAWIENKVKPDPRLLYLACHNIIKKRGHFLFEGDFDSENQFDTSIQALFEYLREDMEVDIDADSQKVKEILKDSSLKNSEKQSRLNKMLGLKPSDKQKKAITNLISGNKINFADLYDNPDLKDAEKNSISFSKDDFDALSDDLASILGDSFELLLKAKAVYNCSVLSKVIGDEQYLSFAKVKIYEKHKTDLTKLKNVIKKHFPKDYKKVFGYNKNEKNNNNYSGYVGVCKTKSKKLIINNSVNQEDFYKFLKTILSAKSEIKEVNDILTEIETGTFLPKQISKSNAEIPYQLRKMELEKILSNAEKHFSFLKQKDEKGLSHSEKIIMLLTFKIPYYIGPINDNHKKSFPDRCWVVKKEKSPSGKTTPWNFFDHIDKEKTAEEFITSRTNFCTYLIGESVLPKNSLLYSEYTVLNEINNLQIIIDGKNICDTKLKQKIYEELFKKYKKITQKQISTFIKHEGICNKTDEVIILGIDKECTSSLKSYIELKNIFGKQVDEISTKNMLEEIIRWATIYDEGEGKTILKTKIKAEYGKYCSDEQIKKILNLKFSGWGRLSRKFLETVTSEMPGFSEPVNIITAMRETQNNLMELLSSEFKFTENIKKINSGFEDVEKQFSYDGLVKPLFLSPSVKKMLWQTLKLVKEISHITQAPPKKIFIEMAKGAELDPVRTKTRLKILQDLYNNCKNDADAFSSEIKDLSGKIENEDNLRLRSDKLYLYYTQLGKCMYCGKPIEIGHVFDTSNYDIDHIYPQSKIKDDSISNRVLVCSSCNKNKEDKYPLKAEIQSKQRGFWNFLQRNNFISLEKFNRLTRATPISDDETAKFIARQLVETRQATKVAARVLEKMFPETKIVYSKAETVSMFRNKFDIVKCREINDFHHAHDAYLNIVVGNVYNTKFTNNLWNFIKEKRDNPKIADTYNYYKVFDYDVKRNNITAWEKGKTIITVKDMLKRNTPIYTRQAACKKGGLFDQTIMKKGLGQHPLKKEGPFSNISKYGGYNKVSAAYYTLIEYEEKGNKIRSLETIPLYLVKDIQKDQDVLKSYLTDLLGKKEFKILVPKIKINSLLKINGFPCHITGKTNDSFLLRPAVQFCCSNDEVLYFKKIIRFSEIRSQREKIGKTISPYEDLSFRSYIKENLCKKTKNDEIGEKEFYDLLQKKNLEIYDMLLTKHKDTIYKKRPNSATIDILVKGKEKFKSLIIENQFEVILEILKLFSATRNVSDLQHIGGSKYSGVAKIGNKISSLDNCILIYQSITGIFEKRIDLLKV

SEQ ID NO: 1332 - protein, 357 aa, Treponema denticola
MKKEIKDYFLGLDVGTGSVGWAVTDTDYKLLKANRKDLWGMRCFETAETAEVRRLHRGARRRIERRKKRIKLLQELFSQEIAKTDEGFFQRMKESPFYAEDKTILQENALFNDRDFTDKTYHKAYPTINHLIKAWIENKVKPDPRLLYLACHNIIKKRGHFLFEGDFDSENQFDTSIQAFFEYLREDMEVDIDADSQKIKEILKDSSLKNSEKQSRLNKILGLKSSDKQKKAITNLISGNKINFADLYDNPDLKDAEKNSISFSKDDFDALSDDLASILGDSFELLLKAKAVYNCSVLSKVIGDEQYLSFAKVKIYEKHKTDLTKLKNVIKKHFPKDYKKVFGYNKNEKITTITPDM

SEQ ID NO: 1333 - protein, 1395 aa, Treponema denticola
MKKEIKDYFLGLDVGTGSVGWAVTDTDYKLLKANRKDLWGMRCFETAETAEVRRLHRGARRRIERRKKRIKLLQELFSQEIAKTDEGFFQRMKESPFYAEDKTILQENALFNDRDFTDKTYHKAYPTINHLIKAWIENKVKPDPRLLYLACHNIIKKRGHFLFEGDFDSENQFDTSIQALFEYLREDMEVDIDADSQKVKEILKDSSLKNSEKQSRLNKMLGLKPSDKQKKAITNLISGNKINFADLYDNPDLKDAEKNSISFSKDDFDALSDDLASILGDSFELLLKAKAVYNCSVLSKVIGDEQYLSFAKVKIYEKHKTDLTKLKNVIKKHFPNDYKKVFGYNKNEKNNNNYSAYVGVCKTKSKKLVINNTVNQEDFYKFLKPILLAKSEIKEVNDILTEIETGTFLPKQISKSNAEIPYQLRKMELEKILSNAEKHFSFLKQKDEKGLSHSEKIIMLLTFKIPYYIGPINDNHKKSFPDRCWVIKKEKSPSGKTTPWNFFDHIDKDKTAEAFITSRTNFCTYLVGESVLPKNSLLYSEYTVLNEINNLQIIIDGKNICDIKLKQKIYEELFKKYKKITQKQISTFIKHEGICNKTDEVIILGIDKECTSSLKSYIELKNIFGKQVDEISTKNMLEEIIRWATIYDEGEGKTILKTKIKAEYGKYCSDEQIKKILNLKFSGWGRLSRKFLETVTSEMPGFSEPVNIITAMRETQNNLMELLSSEFKFTENIKKINSGFEDVEKQFSYDSLVKPLFLSPSVKKMLWQTLKLVKEISHITQAPPKKIFIEMAKGAELDPVRTKTRLKILQDLYNNCKNDADAFSSEIKDLSGKIENEDNLRLRSDKLYLYYTQLGKCMYCGKPIEIGHVFDTSNYDIDHIYPQSKIKDDSISNRVLVCSSCNKNKEDKYPLKAEIQSKQRGFWNFLQRNNFISLEKLNRLTRTSPISDDETAKFIARQLVETRQATKVAAKVLEKMFPETKIVYSKAETVSMFRNKFDIIKCREINDFHHAHDAYLNIVVGNVYNTKFTNNPWNFIKEKRDNPKIADTYNYYKVFDYDVKRNNITAWEKGKTIITVKDMLKRNTPIYTRQAACKKGELFNQTIMKKGLGQHPLKKEGPLSNISKYGGYNKVSAAYYTLIEYEEKGSKIRSLETIPLYLVKDIQKNKDGLKSYLTDQIGKKEIKILIPKIKINSLLKINGFPCHITGKMGEAFVLRPAVQFCCSNDEALYFKKIIRFNEIRKQREKMGKTISPYEDLSFRSYIKDNLCKKTKADEIEEKEFYDLLQKKNLEIYDMLLTKHKDTIYKKRPNSATIDILVKGKEKFKSLIIENQFEVILEILKLFSATRNVSDLQHIGGSKNAGNARVGNKISSLDNCILIYQSITGIFEKRIDLLKI

SEQ ID NO: 1334 - protein, 631 aa, Treponema denticola
MLWQTLKLVKEISHITQAPPKKIFIEMAKGAELEPARTKTRLKILQDLYNNCKNDADAFSSEIKDLSGKIENEDNLRLRSDKLYLYYTQLGKCMYCGKPIEIGHVFDTSNYDIDHIYPQSKIKDDSISNRVLVCSSCNKNKEDKYPLRSEIQSKQRGFWNFLQRNNFISLEKLNRLTRTTPISDDETAKFIARQLVETRQATKVAAKVLEKMFPETKIVYSKAETVSMFRNKFDIVKCREINDFHHAHDAYLNIVVGNIYNTKFTNNPWNFIKEKRDNPKIADTYNYYKVFDYDVKRNNITAWEKGKTIITVKDMLKRNTPIYTRQAACKKGGLFDQTIMKKGLGQHPLKKEGPFSNISKYGGYNKVSAAYYTLIEYEEKENKIRSLETIPLYLVKDIQKSQEKLKSYLTDLLGKKEIKILVPKIKINSLLKINGFPCHITGKTNDSFLLRPAVQFCCSNDEVLYFKKIIRFNEIRSQREKMGKTISPYEDLSFRSYIKENLCKKTKNDEIGEKEFYDLLQKKNLEIYDMLLTKHKDTIYNKRPNSTTLGMLTKGRYEFINLKPKDQIIVMLEILKLFCTTREAIDLGLIKGKPAAGVATLGKKISNLDNCILIYQSITGIFEKRIDLLKV

SEQ ID NO: 1335 - protein, 631 aa, Treponema denticola
MLWQTLKLVKEISHITQAPPKKIFIEMAKGAELEPARTKTRLKILQDLYSSCKNDADAFSSEIQYLSGKIENEDNLRLRSDKLYLYYTQLGKCMYCGKPIEIGHVFDTSNYDIDHIYPQSKIKDDSISNRVLVCSSCNKNKEDKYPLKSEIQSKQRGFWNFLQRNNFISLEKLNRLTRTTPISDDETAKFIARQLVETRQATKVAAKVLEKMFPETKIVYSKAETVSMFRNKFDIIKCREINDFHHAHDAYLNIVVGNVYNTKFTNNPWNFIKEKRDNPKIADTYNYYKVFDYDVKRNNITAWEKGKTIITVKDMLKRNTPIYTRQAACKKGELFNQTIMKKGLGQHPLKKEGPFSNISKYGGYNKVSAAYYTLIEYEEKVNKIRSLETIPLYLVKDIQKDQDVLKSYLTDLLGKKEIKILVPKIKINSLLKINGFPCHITGKTGDSFVLRPAVQFCCSNDEVLYFKKIIRFNEIRSQREKMGKTISPYEDLSFRSYIKENLCKKTKADEIGEKEFYDLLQKKNLEIYDMLLTKHKDTIYNKRPNSTTLGMLTKGRYEFINLKPKDQIIVMLEILKLFCTTREAIDLGLIKGKPAAGVATLGKKISNLDNCILIYQSITGIFEKRIDLLKV

SEQ ID NO: 1336 - protein, 370 aa, Treponema denticola
MTEIETGTFLPKQISKSNAEIPYQLRKMELEKILSNAEKHFSFLKQKDEKGLSHSEKIIMLLTFKIPYYIGPINDNHKKSFPDRCWVVKKEKSPSGKTTPWNFFDHIDKEKTAEEFITSRTNFCTYLVGESVLPKSSLLYSEYTVLNEINNLQIIIDGKNICDIKLKQKIYEELFKKYKKITQKQISTFIKHEGICNKTDEVIILGIDKECTSSLKSYIELKNIFGKQVDEISTKNMLEDIIRWAAIYDEGEGKTILKTKIKAEYGKYCSDEQIKKILNLKFSGWGRLSRKFLETVTSEMPGFSEPVNIITAMRETQNNLMELLSSEFKFTENIKKINSGFEDVEKQFSYDGLVKPLFLSPSVKKCCGRL

SEQ ID NO: 1337 - protein, 591 aa, Treponema phagedenis
MARGKEAEKGRTSSRYASIKALYENCKQDLADYDAVLEQFKSEEPLRLRSDKLYLYYTQLGRCMYTGRVIDIDRLMSDNSAYDIDHIYPRSKIKDDSLTNRVLVVKDANQDKRDEPLSPQIQDKQKGFWDFLKHNNFISIEKYERLTYRGYFTEEMLSGFIARQLVETRQGTKTAGQILEQLYPDSTVVYCKAANTSEFRQKFNLIKCREINDLHHAHDAYLNIAVGNVYYTKFTSNPRNFMKLKEPYNLRELFDRDVERNNTIAWVKNKTITTIKDMLKRNTPLYTRYAYCKTGGFFDQNIMKKGKGQFPLKENSPLSDISKYGGYNKVSGAYFILVQKKEKDAVVRILETVPLYLLNKPGKESENVREYLSTALGTKDFKILIPKIKINSLFKINGFLVHITGKTNDRFLVRSAVQFFCDDNLTLFFKRIIAFNGLRNLNKDKSMTAYDDNTMRVYVRGNLFKDKNQLFDKNKFNEIVKGKNISVYKDMVKRYETSIYKFRPNTAVIPILKSGEDKFINLPIEEQFKILQEILKLFGAINGTANLTLIGGRPSTGEMKISNNISNLKQCILIHQSPTGVFEQQIDLLKI

SEQ ID NO: 1338 - protein, 1062 aa, Treponema sp.
MIMKLEKWRLGLDLGTNSIGWSVFSLDKDNSVQDLIDMGVRIFSDGRDPKTKEPLAVARRTARSQRKLIYRRKLRRKQVFKFLQEQGLFPKTKEECMTLKSLNPYELRIKALDEKLEPYELGRALFNLAVRRGFKSNRKDGSREEVSEKKSPDEIKTQADMQTHLEKAIKENGCRTITEFLYKNQGENGGIRFAPGRMTYYPTRKMYEEEFNLIRSKQEKYYPQVDWDDIYKAIFYQRPLKPQQRGYCIYENDKERTFKAMPCSQKLRILQDIGNLAYYEGGSKKRVELNDNQDKVLYELLNSKDKVTFDQMRKALCLADSNSFNLEENRDFLIGNPTAVKMRSKNRFGKLWDEIPLEEQDLIIETIITADEDDAVYEVIKKYDLTQEQRDFIVKNTILQSGTSMLCKEVSEKLVKRLEEIADLKYHEAVESLGYKFADQTVEKYDLLPYYGKVLPGSTMEIDLSAPETNPEKHYGKISNPTVHVALNQTRVVVNALIKEYGKPSQIAIELSRDLKNNVEKKAEIARKQNQRAKENIAINDTISALYHTAFPGKSFYPNRNDRMKYRLWSELGLGNKCIYCGKGISGAELFTKEIEIEHILPFSRTLLDAESNLTVAHSSCNAFKAERSPFEAFGTNPSGYSWQEIIQRANQLKNTSKKNKFSPNAMDSFEKDSSFIARQLSDNQYIAKAALRYLKCLVENPSDVWTTNGSMTKLLRDKWEMDSILCRKFTEKEVALLGLKPEQIGNYKKNRFDHRHHAIDAVVIGLTDRSMVQKLATKNSHKGNRIEIPEFPILRSDLIEKVKNIVVSFKPDHGAEGKLSKETLLGKIKLHGKETFVCRENIVSLSEKNLDDIVDEKIKSKVKDYVAKHKGQKIEAVLSDFSKENGIKKVRCVNRVQTPIEITSGKISRYLSPEDYFAAVIWEIPGEKKTFKAQYIRRNEVEKNSKGLNVVKPAVLENGKPHPAAKQVCLLHKDDYLEFSDKGKMYFCRIAGYAATNNKLDIRPVYAVSYCADWINSTNETMLTGYWKPTPTQNWVSVNVLFDKQKARLVTVSPIGRVFRK

SEQ ID NO: 1339 - protein, 281 aa, Treponema vincentii
MKTLGLDIGTNSIGWGIVDETANKIEDCGVYIFPEGVKKEKGNESSKAAERTSFRLARRLKFRRKLRKCETLKVLIKNKMCPLTMEELEKWRKQKIYPVSQDFLNWYRTDELKNWEPYFLRKKCAEQKAGPYEIGRALYHLAQRRGFLSNRKESTKASDGKVSKSIDELSSLMDGRTLGQYFYELKQSGEKVRGKYTSRKEHYEKEFNKICEVQEISPELKDDLYRAIFFQRKLKSQKFLVGKCTFERNKPRAPISHFEFEEFRMLSFINSIKIAKKLRRR

SEQ ID NO: 1340 - protein, 675 aa, Unknown
  Description of Unknown: uncultured bacterium polypeptide
MTAENYSNVRFAFDIGTNSIGWAVFQLNDKQEATSILNAGARIFSDGRDPKTFEPLAVRRRNVRSASRMRDRYLRRRKRTLDKLIGYGLLPEDKAERDKILLETNDKPSGSTDKKTDPYSLRARALEEKLPLAYVARALFHIGQRRGFKSNRKADRKSNEKGKIAAGIEELSGLMHQSHAPTLGAYLAKRREEGHVVRLRASSEALTNKAYAFYPERAMLEDEFHKIWQAQAEYYPDVLTKEREEELFHVMFFQRPLKEQKVGLCTLVEGELRLPKSDPLFQQFRLYKEINELAIILPDLSQRKLTMEERDTLITLMRPAKTKTFAALRKALKIPAGGRFNKETENRKQLTGDEVYSVFSKPELFGGDWAKFSIEQQREIIDQLNNEENPDKLEEWLKNKFPKLSDEQRSEIINANLPDGYGRFGITATSKILEQLKKDVISEAEAAHRCGFDHSLANRNWKGLDELPRYQEVLERHIVPGTGDKNDIYDIYKGRLTNPTVHIGLNQVRRLTNRLIKAYGKPWQIVVELARDLPMSSEERKEHNKTLNDNIKAGFERTQKLERLGQKDNANNRLLLKLWEELGKDPDDRKSIYSGTRITEPMLFSGEVEIDHILPFSLTYDDSYANKILCLREENRIKRNRAPADVTEWKDRYDEIIGRSKNCQRTNKNVLGPMQ

SEQ ID NO: 1341 - protein, 1017 aa, Unknown
  Description of Unknown: uncultured bacterium polypeptide
MRVDSLGRCLSDEEWARVIYHLCKHRGFHWISRAEAKQTEGDSKSEGGKVKQGLAGTAKLMDEKGYRSAAEMVLAEFPEAQRNKQGEYRKALSRELLAKELALLFARQRVFGNRHATDTLETAILGNSDKKSGLFWQQKPALAGADLLKMLGTCTFEKNEYRAPKASFTAERHVWLTRLNNLRIVTDGITRQLTEQERQLVLPLPYRQAGDLTYKQLGMALTKAGLLEAGCFKFIGLAYPTEAQKAEGKTKDPESATLVKIPAWQELRQTLNKASLNDEWEKLSGDALCGQPEIFDKIAWILSVYKDDDEVRTELAKLVLPNPEGLTEALLNIRFDKFHALSLKALRAIVPHMEKGLRYDEACVQAGYHHSQLHKIGEGEHKYLPPLYDGRDGDGRMIFAEDADIPRNPVVLRSLNQARKVVNAIIRRYGSPSAVHIEMARDLSRPFDERNKIKKDQDEYQARNQRDREQFIELFGHPPKGLEFEKWRLYREQNGQCAYSQKPLASSGDVAEIFLDGSTEIDHALPYSRSFDDSKNNKVLVLTRENRDKGNRTPYEYLGGAENSERWQRFFSFVESNKAYRLAKRTRLLRKDFGAKESEEFRERNLNDTRYVCRFFKNYVEQHLKLAEGSEAKRCVVVSGQLTNFLRTRWGLLKIRSDSDRHHALDAAVVAACSHSMVQRLSNYSRTRELEQVRDGFVNIETGEIVNPAMHQQLREHFPDPWPYFRHELEARLKIDSPALLREEMARLSSYTEEELAALKPLFVSRAPQRRNGGAAHKDTIYGQPEKLKKNGSVSQKVALASLALKDIDLLADPHRNAKLYGAIRERLEAHGGKGDKAFPATNPLRKPDKEGNPTGPIVRTVTKVIDKLSGIPVRGGIAKNDTMLRVDVFTKAGRFHLVPVYVHHRVTGLPNQAITRGKDENQWAIIDDTFEWRFSLYPNDLVQIRLKDETHLGYYASTDRSTSSISIWAHDRNQSVGKDGLIRSIGVTTAKDIEKFHVDTLGNVYPAPPEKRRGLA

SEQ ID NO: 1342 - protein, 600 aa, Unknown
  Description of Unknown: uncultured bacterium polypeptide
VNAIIKKHGSLSAVHIEMARDLSRPLDERREVKKLQEEFKDRNDKARESFEADHGYRPKGIVFEKWMLYREQHGKCAYSMEGLDIDRVLNDANYAQIDHALPYSRSYDDSKNNKVLVLTRENQNKGNRTAYEYLTSFAGGEDGDRWRNYAAWVNSNKSYRMAKRNRLLRKNYGPDEASGFKDRNLNDTRYICKFFKNYVEEHLQLAPRADGNANKRCVVVNGQLTAFLRARWGLSKVRSESDRHHALDAAVVAACSHGMVKALADYARNKEVAYLREGFPDPETGEIINPEAHARGVHHFPEPWAHFRHELQVRLYSDDLQALREDLQRLGTYSEQDLLGVRTLFVSRAPQRRNDGAVHKETIYAQPEALRKQGGVVQKVPLTSLSLKDLDNLADPHRNAKLYTALRARLEAHGGKADKAFGPDQPFYKPDKNGNPTGPIVRTIKLVIDKLSGIPIRGGVAKNDTMLRVDVFTKAGKFHLVPVYVHHRVTGLPDRAIVAFKDEVEWTQVDDSFKFLFSIHPNDLIRIGLKAKEPMIGYFASCHRGTGAFNVWSHDRNTSVGKSGSVEGIGIKTALSLEKLNIDVLGNVYPARPEQRHGLA

SEQ ID NO: 1343 - protein, 1011 aa, Unknown
  Description of Unknown: uncultured delta polypeptide
MSSKAIDSLEQLDLFKPQEYTLGLDLGIKSIGWAILSGERIANAGVYLFETAEELNSTGNKLISKAAERGRKRRIRRMLDRKARRGRHIRYLLEREGLPTDELEEVVVHQSNRTLWDVRAEAVERKLTKQELAAVLFHLVRHRGYFPNTKKLPPDDESDSADEEQGKINRATSRLREELKASDCKTIGQFLAQNRDRQRNREGDYSNLMARKLVFEEALQILAFQRKQGHELSKDFEKTYLDVLMGQRSGRSPKLGNCSLIPSELRAPSSAPSTEWFKFLQNLGNLQISNAYREEWSIDAPRRAQIIDACSQRSTSSYWQIRRDFQIPDEYRFNLVNYERRDPDVDLQEYLQQQERKTLANFRNWKQLEKIIGTGHPIQTLDEAARLITLIKDDEKLSDQLADLLPEASDKAITQLCELDFTTAAKISLEAMYRILPHMNQGMGFFDACQQESLPEIGVPPAGDRVPPFDEMYNPVVNRVLSQSRKLINAVIDEYGMPAKIRVELARDLGKGRELRERIKLDQLDKSKQNDQRAEDFRAEFQQAPRGDQSLRYRLWKEQNCTCPYSGRMIPVNSVLSEDTQIDHILPISQSFDNSLSNKVLCFTEENAQKSNRTPFEYLDAADFQRLEAISGNWPEAKRNKLLHKSFGKVAEEWKSRALNDTRYLTSALADHLRHHLPDSKIQTVNGRITGYLRKQWGLEKDRDKHTHHAVDAIVVACTTPAIVQQVTLYHQDIRRYKKLGEKRPTPWPETFRQDVLDVEEEIFITRQPKKVSGGIQTKDTLRKHRSKPDRQRVALTKVKLADLERLVEKDASNRNLYEHLKQCLEESGDQPTKAFKAPFYMPSGPEAKQRPILSKVTLLREKPEPPKQLTELSGGRRYDSMAQGRLDIYRYKPGGKRKDEYRVVLQRMIDLMRGEENVHVFQKGVPYDQGPEIEQNYTFLFSLYFDDLVEFQRSADSEVIRGYYRTFNIANGQLKISTYLEGRQDFDFFGANRLAHFAKVQVNLLGKVIK

SEQ ID NO: 1344 - protein, 1011 aa, Veillonella sp.; identical to SEQ ID NO: 1343

SEQ ID NO: 1345 - protein, 1120 aa, Veillonella sp.
MGFKANLVNLFTDEDIEVILPEEKEFKSINLHEGIYEDVRDAYEDAWGDRFAIVDQCKVLHDIIVISSIIKPGQSLSEAKIESYNQHKEDLVLLKSVLKEDRKLYDDMFVVDTDKGTNYVKYTKQGVNGNTSATQEEFYKYVRKVVSVLPETEHTRRIVQKLEEGTFLPLQRISKNGVVPYQLHKEELVRILDKATVNFPFLNKVENGLTVADKIISILEFKIPYYVGPLNPTHSIENGGFAWVVRKEAGQVLPWNFEQKVDVQASAVKFIENLTNKCTYLIDQDVLPKYSLLYAEFSLLNELNNIRVNDKPLPADVKQAFIRDHFISLQDSKTATKKVVAKYLVDNNYVSQPPIITGMDQQIATKLTSHRDMTRILGEHFDHAMAEDIIRYITIFGESKDMLRQVLKNYYGDRLTTEQIKKLGKLTYTGWGRLSKKFLSDIWGMKKNDDDAEAGTIIEHMREGQENLMQLLSSSYSFIDVVQEYVTNVLGEKEKTAFEMLEDLSLSPMVKRSVWQTLRILDEIVSIRKELPKKIFVEVARTNKADKKRTQSRKALLEELYKQIKDEDVHVLQQELESKEDSALNSKKLYLYFTQMGRCMYSGRRIDIHELFTDKYDIDHIYPRSLTKDDSWHNIVLVEKQLNAEKTDRFPILSAIQSKQKGFWKLLWDRGFISEKKYDRLVRTTDLTDEELNQFINRQMVSTNQSVKAVTTLLHQLYPETEVVFSKAENVSDFRHDYDFVKVRSINHHHHAKDAYLNIVVGNVYHEKFTKNFLSFAKQKGTRRTYNLTKIFEYEIKLTEESKKVIWDPNIHMDIVKKMMKSNDVRVTQRAVPQKGGLSDETIYKKGIAKRGVYLPLKSSDERVRDVEKYGGRTSITISEYIILNIRDTSDQDRIEIFSLPLYIAGKKDIHKAIEEAYLSTCKKPASVVDIQILYRGLYIGSKVNINGFTYYMGGKTGSNVSIDSAVDVVMDITSSVYIKLLEKVAIKKIENPKTFRIENIKTSYNHKEVTVSKEQNIALYQELLKKLDTPLFSKMKGNKLEEFRTVGFDTFIALSLEEQASVLLEVLNVLTNFKTKRDITKIGMTSSRSTLGINISNTEQFSVITTSITGLYEQEIKIK

SEQ ID NO: 1346 - protein, 983 aa, Verminephrobacter aporrectodeae
MRRRRDRLLKRKARMHDQLMRHGFFPADAAGRKVLERLNPYQLRAKGLHQALTPGEFARALFHINQRRGFQSNRKTDRKDNESGALKQAISELRAQIHDSGCATVGEWFWKERMQQKPEGVHRQGVRARYRETPYTTDEGRQRIDKRYDLYVDRAMIEQEFDALWAVQAALQPGLFTDAACKELRYTLLFQRKLRPVKPGRCTLLPEEERAPLALPSTQRFRILQEVNHLRLLDEALREVPLTLAQRDALVAALESQGKLGFAPMRKLLKLPGTVKFNLEDEKRTELKGNATSAILARKDLFGPAWAGFDAALQDEIVWQLVSEEGEGRLIAWLQQHTGVDEARAEAIADTSLPEGYGSLSRKALERIVPALQREVCSYDKAVQAAGFAHHSDLGFDFEHSGDEVQQVGERIIASTGEVRPLFAFKQLPYYGKALQRHVAFGSGKPEDPEEKRHGKIANPTVHIGLNQVRTVVNALIRRYGRPSEVVVELARDLKQSREQQQETQRKQAENQRRNTRIRERIAETLGISPERVRSSDIQKWILWEELSFDVVDRRCPYSGEQISTTMLLSPKVEIEHILPFSQTLDDSLNNRTVALREANRIKRNRTPWDARADFEARGWSYEGILHRAERMPLRKRYRFAPDGYQRWLGEDKDFLARALNDTRYLSRVAANYLRLVCPKPQGVRVIPGRMTAMLRAKFGLNDVLGLDGEKNRNDHRHHAVDACVIGVTDQGLMQRFARASAQAREDGLTRLVQDMPLPWPSYRDHVERAVRHIWVSHKPDHGFEGAMMEETAYGIRKDGSIKPRRKADGSAGREVVNLIRITESRQPVRHGVDSQGQPLPYKGYVGGSNYCIEITANDQGKWEGAVISTFEAYRIVRASGWGRLRHCSHGQNGRPLMMRLMIGDAVRLALDGSEKTMRVVKISANGQVFLVAPNEANVDARNRDKADPFAYVSKKAGSFQSAKARQVSISPIGELRDPGFKG

SEQ ID NO: 1347 - RNA, 28 nt, Artificial Sequence
  Description of Artificial Sequence: Synthetic oligonucleotide
guucacugccguauaggcagcuaagaaa

SEQ ID NO: 1348 - RNA, 36 nt, Artificial Sequence
  Description of Artificial Sequence: Synthetic oligonucleotide
guugcaagggauugagccccguaaggggauugcgac

SEQ ID NO: 1349 - RNA, 36 nt, Artificial Sequence
  Description of Artificial Sequence: Synthetic oligonucleotide
guugcaaaccucguuagccucguagaggauugaaac

SEQ ID NO: 1350 - RNA, 37 nt, Artificial Sequence
  Description of Artificial Sequence: Synthetic oligonucleotide
ggaucgauacccaccccgaagaaaaggggacgagaac

SEQ ID NO: 1351 - RNA, 36 nt, Artificial Sequence
  Description of Artificial Sequence: Synthetic oligonucleotide
gucgucagacccaaaaccccgagaggggacggaaac

SEQ ID NO: 1352 - RNA, 36 nt, Artificial Sequence
  Description of Artificial Sequence: Synthetic oligonucleotide
gauauaaaccuaauuaccucgagaggggacggaaac

SEQ ID NO: 1353 - RNA, 29 nt, Artificial Sequence
  Description of Artificial Sequence: Synthetic oligonucleotide
ccccagucaccucgggaggggacggaaac

SEQ ID NO: 1354 - RNA, 37 nt, Artificial Sequence
  Description of Artificial Sequence: Synthetic oligonucleotide
guuccaauuaaucuuaaacccuauuagggauugaaac

SEQ ID NO: 1355 - RNA, 32 nt, Artificial Sequence
  Description of Artificial Sequence: Synthetic oligonucleotide
gucgccccccacgcgggggcguggauugaaac

SEQ ID NO: 1356 - RNA, 32 nt, Artificial Sequence
  Description of Artificial Sequence: Synthetic oligonucleotide
ccagccgccuucgggcggcuguguguugaaac

SEQ ID NO: 1357 - RNA, 32 nt, Artificial Sequence
  Description of Artificial Sequence: Synthetic oligonucleotide
gucgcacucuacaugagugcguggauugaaau

SEQ ID NO: 1358 - RNA, 33 nt, Artificial Sequence
  Description of Artificial Sequence: Synthetic oligonucleotide
ugucgcaccuuauauaggugcguggauugaaau

SEQ ID NO: 1359 - RNA, 32 nt, Artificial Sequence
  Description of Artificial Sequence: Synthetic oligonucleotide
gucgcgccccgcauggggcgcguggauugaaa

SEQ ID NO: 1360 - protein, 6 aa, Artificial Sequence
  Description of Artificial Sequence: Synthetic 6xHis Tag
HHHHHH

SEQ ID NO: 1361 - protein, 9 aa, Unknown
  Description of Unknown: 'LAGLIDADG' family motif peptide
LAGLIDADG

SEQ ID NO: 1362 - protein, 4 aa, Unknown
  Description of Unknown: 'DEAD' box domain peptide
DEAD

SEQ ID NO: 1363 - protein, 4 aa, Unknown
  Description of Unknown: 'DEAH' box domain peptide
DEAH

SEQ ID NO: 1364 - DNA, 23 bp, Artificial Sequence
  Description of Artificial Sequence: Synthetic oligonucleotide
  modified_base (1)..(21): a, c, t, g, unknown or other
nnnnnnnnnnnnnnnnnnnnnrr

SEQ ID NO: 1365 - RNA, 104 nt, Artificial Sequence
  Description of Artificial Sequence: Synthetic polynucleotide
ggggccacuagggacaggauguuuuagagcuagaaauagcaaguuaaaauaaggcuaguccguuaucaacuugaaaaaguggcaccgagucggugcuuuuuuuu

SEQ ID NO: 1366 - RNA, 104 nt, Artificial Sequence
  Description of Artificial Sequence: Synthetic polynucleotide
ggggccacuagggacaggauguuuuagaggaugaaaauccaaguuaaaauaaggcuaguccguuaucaacuugaaaaaguggcaccgagucggugcuuuuuuuu

SEQ ID NO: 1367 - RNA, 104 nt, Artificial Sequence
  Description of Artificial Sequence: Synthetic polynucleotide
ggggccacuagggacaggauguuuuagacucagaaaucagaaguuaaaauaaggcuaguccguuaucaacuugaaaaaguggcaccgagucggugcuuuuuuuu

SEQ ID NO: 1368 - RNA, 104 nt, Artificial Sequence
  Description of Artificial Sequence: Synthetic polynucleotide
ggggccacuagggacaggaugucucagagcuagaaauagcaaguugagauaaggcuaguccguuaucaacuugaaaaaguggcaccgagucggugcuuuuuuuu

SEQ ID NO: 1369 - RNA, 104 nt, Artificial Sequence
  Description of Artificial Sequence: Synthetic polynucleotide
ggggccacuagggacaggaugugguagagcuagaaauagcaaguuaaaauaaggcuaguccguuaucaacuugaaaaaguggcaccgagucggugcuuuuuuuu

SEQ ID NO: 1370 - RNA, 104 nt, Artificial Sequence
  Description of Artificial Sequence: Synthetic polynucleotide
ggggccacuagggacaggaugacgaugagacggaaacgucaaguaucguuaaggcuaguccguuaucaacuugaaaaaguggcaccgagucggugcuuuuuuuu

SEQ ID NO: 1371 - RNA, 104 nt, Artificial Sequence
  Description of Artificial Sequence: Synthetic polynucleotide
ggggccacuagggacaggauauuuuagagcuagaaauagcaaguuaaaauaaggcuaguccguuaucaacuugaaaaaguggcaccgagucggugcuuuuuuuu

SEQ ID NO: 1372 - RNA, 104 nt, Artificial Sequence
  Description of Artificial Sequence: Synthetic polynucleotide
ggggccacuagggacaggauauuuuagagcuagaaauagcaaguuaaaacaaggcuaguccguuaucaacuugaaaaaguggcaccgagucggugcuuuuuuuu

SEQ ID NO: 1373 - RNA, 102 nt, Artificial Sequence
  Description of Artificial Sequence: Synthetic polynucleotide
ggggccacuagggacaggauguuuuagagcuagaaauagcucuaaaauaaggcuaguccguuaucaacuugaaaaaguggcaccgagucggugcuuuuuuuu

SEQ ID NO: 1374 - RNA, 102 nt, Artificial Sequence
  Description of Artificial Sequence: Synthetic polynucleotide
ggggccacuagggacaggauguuuuagcuagaaauagcaaguuaaaauaaggcuaguccguuaucaacuugaaaaaguggcaccgagucggugcuuuuuuuu

SEQ ID NO: 1375 - RNA, 100 nt, Artificial Sequence
  Description of Artificial Sequence: Synthetic polynucleotide
ggggccacuagggacaggauguuuuagagcuagaaauaguuaaaauaaggcuaguccguuaucaacuugaaaaaguggcaccgagucggugcuuuuuuuu

SEQ ID NO: 1376 - RNA, 95 nt, Artificial Sequence
  Description of Artificial Sequence: Synthetic oligonucleotide
ggggccacuagggacaggauguuuuagagacaaguuaaaauaaggcuaguccguuaucaacuugaaaaaguggcaccgagucggugcuuuuuuuu

SEQ ID NO: 1377 - RNA, 92 nt, Artificial Sequence
  Description of Artificial Sequence: Synthetic oligonucleotide
ggggccacuagggacaggauguuuuagauacuuaaaauaaggcuaguccguuaucaacuugaaaaaguggcaccgagucggugcuuuuuuuu

SEQ ID NO: 1378 - RNA, 106 nt, Artificial Sequence
  Description of Artificial Sequence: Synthetic polynucleotide
ggggccacuagggacaggauguuuuagagcuagaaauagcaaguuaaaauaacuggcuaguccguuaucaacuugaaaaaguggcaccgagucggugcuuuuuuuu

SEQ ID NO: 1379 - RNA, 104 nt, Artificial Sequence
  Description of Artificial Sequence: Synthetic polynucleotide
ggggccacuagggacaggauguuuuagagcuagaaauagcaaguuaaaauaacccuaguccguuaucaacuugaaaaaguggcaccgagucggugcuuuuuuuu

SEQ ID NO: 1380 - RNA, 104 nt, Artificial Sequence
  Description of Artificial Sequence: Synthetic polynucleotide
ggggccacuagggacaggauguuuuagagcuagaaauagcaaguuaaaauaagacuaguucguuaucaacuugaaaaaguggcaccgagucggugcuuuuuuuu

SEQ ID NO: 1381 - RNA, 104 nt, Artificial Sequence
  Description of Artificial Sequence: Synthetic polynucleotide
ggggccacuagggacaggauguuuuagagcuagaaauagcaaguuaaaauaaagcuagucuguuaucaacuugaaaaaguggcaccgagucggugcuuuuuuuu

SEQ ID NO: 1382 - RNA, 106 nt, Artificial Sequence
  Description of Artificial Sequence: Synthetic polynucleotide
ggggccacuagggacaggauguuuuagagcuagaaauagcaaguuaaaauaagggcuagucccguuaucaacuugaaaaaguggcaccgagucggugcuuuuuuuu

SEQ ID NO: 1383 - RNA, 104 nt, Artificial Sequence
  Description of Artificial Sequence: Synthetic polynucleotide
ggggccacuagggacaggauguuuuagagcuagaaauagcaaguuaaaauaaggcuucaccguuaucaacuugaaaaaguggcaccgagucggugcuuuuuuuu

SEQ ID NO: 1384 - RNA, 104 nt, Artificial Sequence
  Description of Artificial Sequence: Synthetic polynucleotide
ggggccacuagggacaggauguuuuagagcuagaaauagcaaguuaaaauaaggcuaguccgaauucaacuugaaaaaguggcaccgagucggugcuuuuuuuu

SEQ ID NO: 1385 - RNA, 73 nt, Artificial Sequence
  Description of Artificial Sequence: Synthetic oligonucleotide
ggggccacuagggacaggauguuuuagagcuagaaauagcaaguuaaaauaaggcuaguccguuauuuuuuuu

SEQ ID NO: 1386 - RNA, 104 nt, Artificial Sequence; identical to SEQ ID NO: 1365
  Description of Artificial Sequence: Synthetic polynucleotide

SEQ ID NO: 1387 - RNA, 104 nt, Artificial Sequence
  Description of Artificial Sequence: Synthetic polynucleotide
ggggccacuagggacaggaugaaaaagagcuagaaauagcaaguuuuuuuaaggcuaguccguuaucaacuugaaaaaguggcaccgagucggugcuuuuuuuu

SEQ ID NO: 1388 - RNA, 104 nt, Artificial Sequence
  Description of Artificial Sequence: Synthetic polynucleotide
ggggccacuagggacaggaugauauagagcuagaaauagcaaguuauauuaaggcuaguccguuaucaacuugaaaaaguggcaccgagucggugcuuuuuuuu

SEQ ID NO: 1389 - RNA, 104 nt, Artificial Sequence; identical to SEQ ID NO: 1366
  Description of Artificial Sequence: Synthetic polynucleotide

SEQ ID NO: 1390 - RNA, 104 nt, Artificial Sequence
  Description of Artificial Sequence: Synthetic polynucleotide
ggggccacuagggacaggaugaaaaugaggaugaaaauccaaguauuuuuaaggcuaguccguuaucaacuugaaaaaguggcaccgagucggugcuuuuuuuu

SEQ ID NO: 1391 - RNA, 104 nt, Artificial Sequence
  Description of Artificial Sequence: Synthetic polynucleotide
ggggccacuagggacaggaugauuaugaggaugaaaauccaaguauaauuaaggcuaguccguuaucaacuugaaaaaguggcaccgagucggugcuuuuuuuu

SEQ ID NO: 1392 - RNA, 104 nt, Artificial Sequence
  Description of Artificial Sequence: Synthetic polynucleotide
ggggccacuagggacaggauguaauugaggaugaaaauccaaguaauuauaaggcuaguccguuaucaacuugaaaaaguggcaccgagucggugcuuuuuuuu

SEQ ID NO: 1393 - RNA, 104 nt, Artificial Sequence
  Description of Artificial Sequence: Synthetic polynucleotide
ggggccacuagggacaggaugaaaaucaagugaugaaaaucgagauuuuuaaggcuaguccguuaucaacuugaaaaaguggcaccgagucggugcuuuuuuuu

SEQ ID NO: 1394 - RNA, 104 nt, Artificial Sequence
  Description of Artificial Sequence: Synthetic polynucleotide
ggggccacuagggacaggaugaaaaugaaggaugaaaauccaguauuuuuaaggcuaguccguuaucaacuugaaaaaguggcaccgagucggugcuuuuuuuu

SEQ ID NO: 1395 - RNA, 104 nt, Artificial Sequence
  Description of Artificial Sequence: Synthetic polynucleotide
ggggccacuagggacaggaugauuuagagcuagaaauagcaaguuaaauuaaggcuaguccguuaucaacuugaaaaaguggcaccgagucggugcuuuuuuuu

SEQ ID NO: 1396 - RNA, 104 nt, Artificial Sequence; identical to SEQ ID NO: 1368
  Description of Artificial Sequence: Synthetic polynucleotide

SEQ ID NO: 1397 - RNA, 104 nt, Artificial Sequence
  Description of Artificial Sequence: Synthetic polynucleotide
ggggccacuagggacaggaugucccagagcuagaaauagcaaguugggauaaggcuaguccguuaucaacuugaaaaaguggcaccgagucggugcuuuuuuuu

SEQ ID NO: 1398 - RNA, 104 nt, Artificial Sequence; identical to SEQ ID NO: 1367
  Description of Artificial Sequence: Synthetic polynucleotide

SEQ ID NO: 1399 - RNA, 102 nt, Artificial Sequence; identical to SEQ ID NO: 1373
  Description of Artificial Sequence: Synthetic polynucleotide

SEQ ID NO: 1400 - RNA, 96 nt, Artificial Sequence
  Description of Artificial Sequence: Synthetic oligonucleotide
ggggccacuagggacaggauguuuuagaggaaacucuaaaauaaggcuaguccguuaucaacuugaaaaaguggcaccgagucggugcuuuuuuuu

SEQ ID NO: 1401 - RNA, 90 nt, Artificial Sequence
  Description of Artificial Sequence: Synthetic oligonucleotide
ggggccacuagggacaggauguuuuagaaauaaaauaaggcuaguccguuaucaacuugaaaaaguggcaccgagucggugcuuuuuuuu

SEQ ID NO: 1402 - RNA, 104 nt, Artificial Sequence; identical to SEQ ID NO: 1371
  Description of Artificial Sequence: Synthetic polynucleotide

SEQ ID NO: 1403 - RNA, 104 nt, Artificial Sequence; identical to SEQ ID NO: 1372
  Description of Artificial Sequence: Synthetic polynucleotide

SEQ ID NO: 1404 - RNA, 104 nt, Artificial Sequence
  Description of Artificial Sequence: Synthetic polynucleotide
ggggccacuagggacaggaugacgauagaacggaaacguuggacaucguuaaggcuaguccguuaucaacuugaaaaaguggcaccgagucggugcuuuuuuuu

SEQ ID NO: 1405 - RNA, 104 nt, Artificial Sequence; identical to SEQ ID NO: 1370
  Description of Artificial Sequence: Synthetic polynucleotide

SEQ ID NO: 1406 - RNA, 104 nt, Artificial Sequence
  Description of Artificial Sequence: Synthetic polynucleotide
ggggccacuagggacaggauguuuuaagacuagaaauaguggacuaaaauaaggcuaguccguuaucaacuugaaaaaguggcaccgagucggugcuuuuuuuu

SEQ ID NO: 1407 - RNA, 104 nt, Artificial Sequence
  Description of Artificial Sequence: Synthetic polynucleotide
ggggccacuagggacaggaucguuuagagcuagaaauagcaaguuaaaauaaggcuaguccguuaucaacuugaaaaaguggcaccgagucggugcuuuuuuuu

SEQ ID NO: 1408 - RNA, 104 nt, Artificial Sequence; identical to SEQ ID NO: 1369
  Description of Artificial Sequence: Synthetic polynucleotide

SEQ ID NO: 1409 - RNA, 104 nt, Artificial Sequence
  Description of Artificial Sequence: Synthetic polynucleotide
ggggccacuagggacaggauguuugcgagcuagaaauagcaaguuaaaauaaggcuaguccguuaucaacuugaaaaaguggcaccgagucggugcuuuuuuuu

SEQ ID NO: 1410 - RNA, 104 nt, Artificial Sequence
  Description of Artificial Sequence: Synthetic polynucleotide
ggggccacuagggacaggauguuuuagagugagaaauagcaaguucacauaaggcuaguccguuaucaacuugaaaaaguggcaccgagucggugcuuuuuuuu

SEQ ID NO: 1411 - RNA, 104 nt, Artificial Sequence
  Description of Artificial Sequence: Synthetic polynucleotide
ggggccacuagggacaggauguuuuagagcuagaaauagcaaguuacacuaaggcuaguccguuaucaacuugaaaaaguggcaccgagucggugcuuuuuuuu

SEQ ID NO: 1412 - RNA, 104 nt, Artificial Sequence
  Description of Artificial Sequence: Synthetic polynucleotide
ggggccacuagggacaggauguuuuagagcuagaaauagcaaguuaacagaaggcuaguccguuaucaacuugaaaaaguggcaccgagucggugcuuuuuuuu

SEQ ID NO: 1413 - RNA, 106 nt, Artificial Sequence; identical to SEQ ID NO: 1378
  Description of Artificial Sequence: Synthetic polynucleotide

SEQ ID NO: 1414 - RNA, 101 nt, Artificial Sequence
  Description of Artificial Sequence: Synthetic polynucleotide
ggggccacuagggacaggauguuuuagagcuagaaauagcaaguuaaaaugcuaguccguuaucaacuugaaaaaguggcaccgagucggugcuuuuuuuu

SEQ ID NO: 1415 - RNA, 107 nt, Artificial Sequence
  Description of Artificial Sequence: Synthetic polynucleotide
ggggccacuagggacaggauguuuuagagcuagaaauagcaaguuaaaauaacucggcuaguccguuaucaacuugaaaaaguggcaccgagucggugcuuuuuuuu

SEQ ID NO: 1416 - RNA, 108 nt, Artificial Sequence
  Description of Artificial Sequence: Synthetic polynucleotide
ggggccacuagggacaggauguuuuagagcuagaaauagcaaguuaaaauaacucuggcuaguccguuaucaacuugaaaaaguggcaccgagucggugcuuuuuuuu

SEQ ID NO: 1417 - RNA, 110 nt, Artificial Sequence
  Description of Artificial Sequence: Synthetic polynucleotide
ggggccacuagggacaggauguuuuagagcuagaaauagcaaguuaaaauaacucucuggcuaguccguuaucaacuugaaaaaguggcaccgagucggugcuuuuuuuu

SEQ ID NO: 1418 - RNA, 104 nt, Artificial Sequence; identical to SEQ ID NO: 1365
  Description of Artificial Sequence: Synthetic polynucleotide

SEQ ID NO: 1419 - RNA, 98 nt, Artificial Sequence
  Description of Artificial Sequence: Synthetic oligonucleotide
ggggccacuagggacaggauguuuuagaggaaacaaguuaaaauaaggcuaguccguuaucaacuugaaaaaguggcaccgagucggugcuuuuuuuu

SEQ ID NO: 1420 - RNA, 95 nt, Artificial Sequence; identical to SEQ ID NO: 1376
  Description of Artificial Sequence: Synthetic oligonucleotide

SEQ ID NO: 1421 - RNA, 96 nt, Artificial Sequence
  Description of Artificial Sequence: Synthetic oligonucleotide
ggggccacuagggacaggauguuuuaggagaaacuuuaaaauaaggcuaguccguuaucaacuugaaaaaguggcaccgagucggugcuuuuuuuu

SEQ ID NO: 1422 - RNA, 94 nt, Artificial Sequence
  Description of Artificial Sequence: Synthetic oligonucleotide
ggggccacuagggacaggauguuuuaucgaaaucuaaaauaaggcuaguccguuaucaacuugaaaaaguggcaccgagucggugcuuuuuuuu

SEQ ID NO: 1423 - RNA, 92 nt, Artificial Sequence
  Description of Artificial Sequence: Synthetic oligonucleotide
ggggccacuagggacaggauguuuuacuucgguaaaauaaggcuaguccguuaucaacuugaaaaaguggcaccgagucggugcuuuuuuuu

SEQ ID NO: 1424 - RNA, 92 nt, Artificial Sequence; identical to SEQ ID NO: 1377
  Description of Artificial Sequence: Synthetic oligonucleotide

SEQ ID NO: 1425 - RNA, 92 nt, Artificial Sequence
  Description of Artificial Sequence: Synthetic oligonucleotide
ggggccacuagggacaggauguuuuaucgaaauaaaauaaggcuaguccguuaucaacuugaaaaaguggcaccgagucggugcuuuuuuuu

SEQ ID NO: 1426 - RNA, 88 nt, Artificial Sequence
  Description of Artificial Sequence: Synthetic oligonucleotide
ggggccacuagggacaggauguuucuucggaaauaaggcuaguccguuaucaacuugaaaaaguggcaccgagucggugcuuuuuuuu

SEQ ID NO: 1427 - RNA, 103 nt, Artificial Sequence
  Description of Artificial Sequence: Synthetic polynucleotide
ggggccacuagggacaggauguuuuaggcuagaaauagcaaguuaaaauaaggcuaguccguuaucaacuugaaaaaguggcaccgagucggugcuuuuuuuu

SEQ ID NO: 1428 - RNA, 102 nt, Artificial Sequence; identical to SEQ ID NO: 1374
  Description of Artificial Sequence: Synthetic polynucleotide

SEQ ID NO: 1429 - RNA, 101 nt, Artificial Sequence
  Description of Artificial Sequence: Synthetic polynucleotide
ggggccacuagggacaggauguuuuacuagaaauagcaaguuaaaauaaggcuaguccguuaucaacuugaaaaaguggcaccgagucggugcuuuuuuuu

SEQ ID NO: 1430 - RNA, 103 nt, Artificial Sequence
  Description of Artificial Sequence: Synthetic polynucleotide
ggggccacuagggacaggauguuuuagagcuagaaauagcaguuaaaauaaggcuaguccguuaucaacuugaaaaaguggcaccgagucggugcuuuuuuuu

SEQ ID NO: 1431 - RNA, 102 nt, Artificial Sequence
  Description of Artificial Sequence: Synthetic polynucleotide
ggggccacuagggacaggauguuuuagagcuagaaauagaguuaaaauaaggcuaguccguuaucaacuugaaaaaguggcaccgagucggugcuuuuuuuu

SEQ ID NO: 1432 - RNA, 101 nt, Artificial Sequence
  Description of Artificial Sequence: Synthetic polynucleotide
ggggccacuagggacaggauguuuuagagcuagaaauaaguuaaaauaaggcuaguccguuaucaacuugaaaaaguggcaccgagucggugcuuuuuuuu

SEQ ID NO: 1433 - RNA, 100 nt, Artificial Sequence; identical to SEQ ID NO: 1375
  Description of Artificial Sequence: Synthetic polynucleotide

SEQ ID NO: 1434 - RNA, 104 nt, Artificial Sequence; identical to SEQ ID NO: 1365
  Description of Artificial Sequence: Synthetic polynucleotide

SEQ ID NO: 1435 - RNA, 104 nt, Artificial Sequence
  Description of Artificial Sequence: Synthetic polynucleotide
ggggccacuagggacaggauguuuuagagcuagaaauagcaaguuaaaauggaacuaguccguuaucaacuugaaaaaguggcaccgagucggugcuuuuuuuu

SEQ ID NO: 1436 - RNA, 104 nt, Artificial Sequence
  Description of Artificial Sequence: Synthetic polynucleotide
ggggccacuagggacaggauguuuuagagcuagaaauagcaaguuaaaauuucgcuaguccguuaucaacuugaaaaaguggcaccgagucggugcuuuuuuuu

SEQ ID NO: 1437 - RNA, 104 nt, Artificial Sequence
  Description of Artificial Sequence: Synthetic polynucleotide
ggggccacuagggacaggauguuuuagagcuagaaauagcaaguuaaaauaagcgaaguccguuaucaacuugaaaaaguggcaccgagucggugcuuuuuuuu

SEQ ID NO: 1438 - RNA, 104 nt, Artificial Sequence; identical to SEQ ID NO: 1383
  Description of Artificial Sequence: Synthetic polynucleotide

SEQ ID NO: 1439 - RNA, 104 nt, Artificial Sequence
  Description of Artificial Sequence: Synthetic polynucleotide
ggggccacuagggacaggauguuuuagagcuagaaauagcaaguuaaaauaaggcuaguggcuuaucaacuugaaaaaguggcaccgagucggugcuuuuuuuu

SEQ ID NO: 1440 - RNA, 104 nt, Artificial Sequence; identical to SEQ ID NO: 1384
  Description of Artificial Sequence: Synthetic polynucleotide

SEQ ID NO: 1441 - RNA, 104 nt, Artificial Sequence
  Description of Artificial Sequence: Synthetic polynucleotide
ggggccacuagggacaggauguuuuagagcuagaaauagcaaguuaaaauaaggcuaguccguuaaguacuugaaaaaguggcaccgagucggugcuuuuuuuu

SEQ ID NO: 1442 - RNA, 104 nt, Artificial Sequence
  Description of Artificial Sequence: Synthetic polynucleotide
ggggccacuagggacaggauguuuuagagcuagaaauagcaaguuaaaauaaggcuaguccguuaucaugaugaaaaaguggcaccgagucggugcuuuuuuuu

SEQ ID NO: 1443 - RNA, 104 nt, Artificial Sequence; identical to SEQ ID NO: 1379
  Description of Artificial Sequence: Synthetic polynucleotide

SEQ ID NO: 1444 - RNA, 104 nt, Artificial Sequence
  Description of Artificial Sequence: Synthetic polynucleotide
ggggccacuagggacaggauguuuuagagcuagaaauagcaaguuaaaauaacccuaguggguuaucaacuugaaaaaguggcaccgagucggugcuuuuuuuu

SEQ ID NO: 1445 - RNA, 104 nt, Artificial Sequence
  Description of Artificial Sequence: Synthetic polynucleotide
ggggccacuagggacaggauguuuuagagcuagaaauagcaaguuaaaauaaggcuaguggguuaucaacuugaaaaaguggcaccgagucggugcuuuuuuuu

SEQ ID NO: 1446 - RNA, 104 nt, Artificial Sequence
  Description of Artificial Sequence: Synthetic polynucleotide
ggggccacuagggacaggauguuuuagagcuagaaauagcaaguuaaaauaaggcuaguaaguuaucaacuugaaaaaguggcaccgagucggugcuuuuuuuu

SEQ ID NO: 1447 - RNA, 104 nt, Artificial Sequence
  Description of Artificial Sequence: Synthetic polynucleotide
ggggccacuagggacaggauguuuuagagcuagaaauagcaaguuaaaauaaggcuaguuuguuaucaacuugaaaaaguggcaccgagucggugcuuuuuuuu

SEQ ID NO: 1448 - RNA, 104 nt, Artificial Sequence; identical to SEQ ID NO: 1380
  Description of Artificial Sequence: Synthetic polynucleotide

SEQ ID NO: 1449 - RNA, 61 nt, Artificial Sequence
  Description of Artificial Sequence: Synthetic oligonucleotide
ggggccacuagggacaggauguuuuagagcuagaaauagcaaguuaaaauaagguuuuuuu

SEQ ID NO: 1450 - RNA, 65 nt, Artificial Sequence
  Description of Artificial Sequence: Synthetic oligonucleotide
ggggccacuagggacaggauguuuuagagcuagaaauagcaaguuaaaauaaggcuaguuuuuuu

SEQ ID NO: 1451 - RNA, 69 nt, Artificial Sequence
  Description of Artificial Sequence: Synthetic oligonucleotide
ggggccacuagggacaggauguuuuagagcuagaaauagcaaguuaaaauaaggcuaguccguuuuuuu

SEQ ID NO: 1452 - RNA, 73 nt, Artificial Sequence; identical to SEQ ID NO: 1385
  Description of Artificial Sequence: Synthetic oligonucleotide

SEQ ID NO: 1453 - RNA, 106 nt, Artificial Sequence; identical to SEQ ID NO: 1382
  Description of Artificial Sequence: Synthetic polynucleotide

SEQ ID NO: 1454 - RNA, 108 nt, Artificial Sequence
  Description of Artificial Sequence: Synthetic polynucleotide
ggggccacuagggacaggauguuuuagagcuagaaauagcaaguuaaaauaaggggcuaguccccguuaucaacuugaaaaaguggcaccgagucggugcuuuuuuuu

SEQ ID NO: 1455 - RNA, 110 nt, Artificial Sequence
  Description of Artificial Sequence: Synthetic polynucleotide
ggggccacuagggacaggauguuuuagagcuagaaauagcaaguuaaaauaagggggcuagucccccguuaucaacuugaaaaaguggcaccgagucggugcuuuuuuuu

SEQ ID NO: 1456 - RNA, 104 nt, Artificial Sequence
  Description of Artificial Sequence: Synthetic polynucleotide
ggggccacuagggacaggauguuuuagagcuagaaauagcaaguuaaaauaaaacuaguuuguuaucaacuugaaaaaguggcaccgagucggugcuuuuuuuu

SEQ ID NO: 1457 - RNA, 106 nt, Artificial Sequence
  Description of Artificial Sequence: Synthetic polynucleotide
ggggccacuagggacaggauguuuuagagcuagaaauagcaaguuaaaauaaggacuaguuccguuaucaacuugaaaaaguggcaccgagucggugcuuuuuuuu

SEQ ID NO: 1458 - RNA, 104 nt, Artificial Sequence; identical to SEQ ID NO: 1365
  Description of Artificial Sequence: Synthetic polynucleotide

SEQ ID NO: 1459 - RNA, 105 nt, Artificial Sequence
  Description of Artificial Sequence: Synthetic polynucleotide
ggggccacuagggacaggauguuuuagagcuagaaauagcaaguuaaaauaaggcuaguccuguuaucaacuugaaaaaguggcaccgagucggugcuuuuuuuu

SEQ ID NO: 1460 - RNA, 104 nt, Artificial Sequence; identical to SEQ ID NO: 1381
  Description of Artificial Sequence: Synthetic polynucleotide

SEQ ID NO: 1461 - RNA, 106 nt, Artificial Sequence
  Description of Artificial Sequence: Synthetic polynucleotide
ggggccacuagggacaggauguuuuagagcuagaaauagcaaguuaaaauaaggucuagucccguuaucaacuugaaaaaguggcaccgagucggugcuuuuuuuu

SEQ ID NO: 1462 - RNA, 108 nt, Artificial Sequence
  Description of Artificial Sequence: Synthetic polynucleotide
ggggccacuagggacaggauguuuuagagcuagaaauagcaaguuaaaauaagguacuagucgccguuaucaacuugaaaaaguggcaccgagucggugcuuuuuuuu

SEQ ID NO: 1463 - RNA, 110 nt, Artificial Sequence
  Description of Artificial Sequence: Synthetic polynucleotide
ggggccacuagggacaggauguuuuagagcuagaaauagcaaguuaaaauaagguaucuagugcgccguuaucaacuugaaaaaguggcaccgagucggugcuuuuuuuu

SEQ ID NO: 1464 - RNA, 104 nt, Artificial Sequence; identical to SEQ ID NO: 1365
  Description of Artificial Sequence: Synthetic polynucleotide

SEQ ID NO: 1465 - RNA, 94 nt, Artificial Sequence
  Description of Artificial Sequence: Synthetic oligonucleotide
ggggccacuagggacaggauguuuuagagcuagaaauagcaaguuaaaauaaggcuaguccguuaucaauggcaccgagucggugcuuuuuuuu

SEQ ID NO: 1466 - RNA, 95 nt, Artificial Sequence
  Description of Artificial Sequence: Synthetic oligonucleotide
ggggccacuagggacaggauguuuuagagcuagaaauagcaaguuaaaauaaggcuaguccguuaucaacuggcaccgagucggugcuuuuuuuu

SEQ ID NO: 1467 - RNA, 96 nt, Artificial Sequence
  Description of Artificial Sequence: Synthetic oligonucleotide
ggggccacuagggacaggauguuuuagagcuagaaauagcaaguuaaaauaaggcuaguccguuaucaacuuggcaccgagucggugcuuuuuuuu

SEQ ID NO: 1468 - DNA, 23 bp, Artificial Sequence
  Description of Artificial Sequence: Synthetic primer
agtaataatacgactcactatag

SEQ ID NO: 1469 - DNA, 46 bp, Artificial Sequence
  Description of Artificial Sequence: Synthetic primer
tatagtaataatacgactcactatagggggccactagggacaggat

SEQ ID NO: 1470 - DNA, 70 bp, Artificial Sequence
  Description of Artificial Sequence: Synthetic primer
agtaataatacgactcactatagggggccactagggacaggatgttttagagctagaaatagcaagttaa

SEQ ID NO: 1471 - DNA, 70 bp, Artificial Sequence
  Description of Artificial Sequence: Synthetic primer
ggggccactagggacaggatgaaaaagagctagaaatagcaagtttttttaaggctagtccgttatcaac

SEQ ID NO: 1472 - DNA, 70 bp, Artificial Sequence
  Description of Artificial Sequence: Synthetic primer
ggggccactagggacaggatgatatagagctagaaatagcaagttatattaaggctagtccgttatcaac

SEQ ID NO: 1473 - DNA, 70 bp, Artificial Sequence
  Description of Artificial Sequence: Synthetic primer
ggggccactagggacaggatgttttagaggatgaaaatccaagttaaaataaggctagtccgttatcaac

SEQ ID NO: 1474 - DNA, 70 bp, Artificial Sequence
  Description of Artificial Sequence: Synthetic primer
ggggccactagggacaggatgaaaatgaggatgaaaatccaagtatttttaaggctagtccgttatcaac

SEQ ID NO: 1475 - DNA, 70 bp, Artificial Sequence
  Description of Artificial Sequence: Synthetic primer
ggggccactagggacaggatgattatgaggatgaaaatccaagtataattaaggctagtccgttatcaac

SEQ ID NO: 1476 - DNA, 70 bp, Artificial Sequence
  Description of Artificial Sequence: Synthetic primer
ggggccactagggacaggatgtaattgaggatgaaaatccaagtaattataaggctagtccgttatcaac

SEQ ID NO: 1477 - DNA, 70 bp, Artificial Sequence
  Description of Artificial Sequence: Synthetic primer
ggggccactagggacaggatgaaaatcaagtgatgaaaatcgagatttttaaggctagtccgttatcaac

SEQ ID NO: 1478 - DNA, 70 bp, Artificial Sequence
  Description of Artificial Sequence: Synthetic primer
ggggccactagggacaggatgaaaatgaaggatgaaaatccagtatttttaaggctagtccgttatcaac

SEQ ID NO: 1479 - DNA, 70 bp, Artificial Sequence
  Description of Artificial Sequence: Synthetic primer
ggggccactagggacaggatgatttagagctagaaatagcaagttaaattaaggctagtccgttatcaac

SEQ ID NO: 1480 - DNA, 70 bp, Artificial Sequence
  Description of Artificial Sequence: Synthetic primer
ggggccactagggacaggatgtctcagagctagaaatagcaagttgagataaggctagtccgttatcaac

SEQ ID NO: 1481 - DNA, 70 bp, Artificial Sequence
  Description of Artificial Sequence: Synthetic primer
ggggccactagggacaggatgtcccagagctagaaatagcaagttgggataaggctagtccgttatcaac

SEQ ID NO: 1482 - DNA, 70 bp, Artificial Sequence
  Description of Artificial Sequence: Synthetic primer
ggggccactagggacaggatgttttagactcagaaatcagaagttaaaataaggctagtccgttatcaac

SEQ ID NO: 1483 - DNA, 68 bp, Artificial Sequence
  Description of Artificial Sequence: Synthetic primer
ggggccactagggacaggatgttttagagctagaaatagctctaaaataaggctagtccgttatcaac

SEQ ID NO: 1484 - DNA, 62 bp, Artificial Sequence
  Description of Artificial Sequence: Synthetic primer
ggggccactagggacaggatgttttagaggaaactctaaaataaggctagtccgttatcaac

SEQ ID NO: 1485 - DNA, 56 bp, Artificial Sequence
  Description of Artificial Sequence: Synthetic primer
ggggccactagggacaggatgttttagaaataaaataaggctagtccgttatcaac

SEQ ID NO: 1486 - DNA, 70 bp, Artificial Sequence
  Description of Artificial Sequence: Synthetic primer
ggggccactagggacaggatattttagagctagaaatagcaagttaaaataaggctagtccgttatcaac

SEQ ID NO: 1487 - DNA, 70 bp, Artificial Sequence
  Description of Artificial Sequence: Synthetic primer
ggggccactagggacaggatattttagagctagaaatagcaagttaaaacaaggctagtccgttatcaac

SEQ ID NO: 1488 - DNA, 70 bp, Artificial Sequence
  Description of Artificial Sequence: Synthetic primer
ggggccactagggacaggatgacgatagaacggaaacgttggacatcgttaaggctagtccgttatcaac

SEQ ID NO: 1489 - DNA, 70 bp, Artificial Sequence
  Description of Artificial Sequence: Synthetic primer
ggggccactagggacaggatgacgatgagacggaaacgtcaagtatcgttaaggctagtccgttatcaac

SEQ ID NO: 1490 - DNA, 70 bp, Artificial Sequence
  Description of Artificial Sequence: Synthetic primer
ggggccactagggacaggatgttttaagactagaaatagtggactaaaataaggctagtccgttatcaac

SEQ ID NO: 1491 - DNA, 70 bp, Artificial Sequence
  Description of Artificial Sequence: Synthetic primer
ggggccactagggacaggatcgtttagagctagaaatagcaagttaaaataaggctagtccgttatcaac

SEQ ID NO: 1492 - DNA, 70 bp, Artificial Sequence
  Description of Artificial Sequence: Synthetic primer
ggggccactagggacaggatgtggtagagctagaaatagcaagttaaaataaggctagtccgttatcaac

SEQ ID NO: 1493 - DNA, 70 bp, Artificial Sequence
  Description of Artificial Sequence: Synthetic primer
ggggccactagggacaggatgtttgcgagctagaaatagcaagttaaaataaggctagtccgttatcaac

SEQ ID NO: 1494 - DNA, 70 bp, Artificial Sequence
  Description of Artificial Sequence: Synthetic primer
ggggccactagggacaggatgttttagagtgagaaatagcaagttcacataaggctagtccgttatcaac

SEQ ID NO: 1495 - DNA, 70 bp, Artificial Sequence
  Description of Artificial Sequence: Synthetic primer
ggggccactagggacaggatgttttagagctagaaatagcaagttacactaaggctagtccgttatcaac

SEQ ID NO: 1496 - DNA, 70 bp, Artificial Sequence
  Description of Artificial Sequence: Synthetic primer
ggggccactagggacaggatgttttagagctagaaatagcaagttaacagaaggctagtccgttatcaac

SEQ ID NO: 1497 - DNA, 72 bp, Artificial Sequence
  Description of Artificial Sequence: Synthetic primer
ggggccactagggacaggatgttttagagctagaaatagcaagttaaaataactggctagtccgttatcaac

SEQ ID NO: 1498 - DNA, 67 bp, Artificial Sequence
  Description of Artificial Sequence: Synthetic primer
ggggccactagggacaggatgttttagagctagaaatagcaagttaaaatgctagtccgttatcaac

SEQ ID NO: 1499 - DNA, 73 bp, Artificial Sequence
  Description of Artificial Sequence: Synthetic primer
ggggccactagggacaggatgttttagagctagaaatagcaagttaaaataactcggctagtccgttatcaac

SEQ ID NO: 1500 - DNA, 74 bp, Artificial Sequence
  Description of Artificial Sequence: Synthetic primer
ggggccactagggacaggatgttttagagctagaaatagcaagttaaaataactctggctagtccgttatcaac

SEQ ID NO: 1501 - DNA, 76 bp, Artificial Sequence
  Description of Artificial Sequence: Synthetic primer
ggggccactagggacaggatgttttagagctagaaatagcaagttaaaataactctctggctagtccgttatcaac

SEQ ID NO: 1502 - DNA, 70 bp, Artificial Sequence
  Description of Artificial Sequence: Synthetic primer
ggggccactagggacaggatgttttagagctagaaatagcaagttaaaataaggctagtccgttatcaac

SEQ ID NO: 1503 - DNA, 64 bp, Artificial Sequence
  Description of Artificial Sequence: Synthetic primer
ggggccactagggacaggatgttttagaggaaacaagttaaaataaggctagtccgttatcaac

SEQ ID NO: 1504 - DNA, 61 bp, Artificial Sequence
  Description of Artificial Sequence: Synthetic primer
ggggccactagggacaggatgttttagagacaagttaaaataaggctagtccgttatcaac

SEQ ID NO: 1505 - DNA, 62 bp, Artificial Sequence
  Description of Artificial Sequence: Synthetic primer
ggggccactagggacaggatgttttaggagaaactttaaaataaggctagtccgttatcaac

SEQ ID NO: 1506 - DNA, 60 bp, Artificial Sequence
  Description of Artificial Sequence: Synthetic primer
ggggccactagggacaggatgttttatcgaaatctaaaataaggctagtccgttatcaac

SEQ ID NO: 1507 - DNA, 58 bp, Artificial Sequence
  Description of Artificial Sequence: Synthetic primer
ggggccactagggacaggatgttttacttcggtaaaataaggctagtccgttatcaac

SEQ ID NO: 1508 - DNA, 58 bp, Artificial Sequence
  Description of Artificial Sequence: Synthetic primer
ggggccactagggacaggatgttttagatacttaaaataaggctagtccgttatcaac

SEQ ID NO: 1509 - DNA, 58 bp, Artificial Sequence
  Description of Artificial Sequence: Synthetic primer
ggggccactagggacaggatgttttatgaaactaaaataaggctagtccgttatcaac

SEQ ID NO: 1510 - DNA, 54 bp, Artificial Sequence
  Description of Artificial Sequence: Synthetic primer
ggggccactagggacaggatgtttcttcggaaataaggctagtccgttatcaac

SEQ ID NO: 1511 - DNA, 69 bp, Artificial Sequence
  Description of Artificial Sequence: Synthetic primer
ggggccactagggacaggatgttttaggctagaaatagcaagttaaaataaggctagtccgttatcaac

SEQ ID NO: 1512 - DNA, 68 bp, Artificial Sequence
  Description of Artificial Sequence: Synthetic primer
ggggccactagggacaggatgttttagctagaaatagcaagttaaaataaggctagtccgttatcaac

SEQ ID NO: 1513 - DNA, 67 bp, Artificial Sequence
  Description of Artificial Sequence: Synthetic primer
ggggccactagggacaggatgttttactagaaatagcaagttaaaataaggctagtccgttatcaac

SEQ ID NO: 1514 - DNA, 69 bp, Artificial Sequence
  Description of Artificial Sequence: Synthetic primer
ggggccactagggacaggatgttttagagctagaaatagcagttaaaataaggctagtccgttatcaac

SEQ ID NO: 1515 - DNA, 68 bp, Artificial Sequence
  Description of Artificial Sequence: Synthetic primer
ggggccactagggacaggatgttttagagctagaaatagagttaaaataaggctagtccgttatcaac

SEQ ID NO: 1516 - DNA, 67 bp, Artificial Sequence
  Description of Artificial Sequence: Synthetic primer
ggggccactagggacaggatgttttagagctagaaataagttaaaataaggctagtccgttatcaac

SEQ ID NO: 1517 - DNA, 66 bp, Artificial Sequence
  Description of Artificial Sequence: Synthetic primer
ggggccactagggacaggatgttttagagctagaaatagttaaaataaggctagtccgttatcaac

SEQ ID NO: 1518 - DNA, 70 bp, Artificial Sequence; identical to SEQ ID NO: 1502
  Description of Artificial Sequence: Synthetic primer

SEQ ID NO: 1519 - DNA, 79 bp, Artificial Sequence
  Description of Artificial Sequence: Synthetic primer
aaaaaaagcaccgactcggtgccactttttcaagttgataacggactagttccattttaacttgctatttctagctcta

SEQ ID NO: 1520 - DNA, 79 bp, Artificial Sequence
  Description of Artificial Sequence: Synthetic primer
aaaaaaagcaccgactcggtgccactttttcaagttgataacggactagcgaaattttaacttgctatttctagctcta

SEQ ID NO: 1521 - DNA, 79 bp, Artificial Sequence
  Description of Artificial Sequence: Synthetic primer
aaaaaaagcaccgactcggtgccactttttcaagttgataacggacttcgcttattttaacttgctatttctagctcta

SEQ ID NO: 1522 - DNA, 79 bp, Artificial Sequence
  Description of Artificial Sequence: Synthetic primer
aaaaaaagcaccgactcggtgccactttttcaagttgataacggtgaagccttattttaacttgctatttctagctcta

SEQ ID NO: 1523 - DNA, 79 bp, Artificial Sequence
  Description of Artificial Sequence: Synthetic primer
aaaaaaagcaccgactcggtgccactttttcaagttgataagccactagccttattttaacttgctatttctagctcta

SEQ ID NO: 1524 - DNA, 79 bp, Artificial Sequence
  Description of Artificial Sequence: Synthetic primer
aaaaaaagcaccgactcggtgccactttttcaagttgaattcggactagccttattttaacttgctatttctagctcta

SEQ ID NO: 1525 - DNA, 79 bp, Artificial Sequence
  Description of Artificial Sequence: Synthetic primer
aaaaaaagcaccgactcggtgccactttttcaagtacttaacggactagccttattttaacttgctatttctagctcta

SEQ ID NO: 1526 - DNA, 79 bp, Artificial Sequence
  Description of Artificial Sequence: Synthetic primer
aaaaaaagcaccgactcggtgccactttttcatcatgataacggactagccttattttaacttgctatttctagctcta

SEQ ID NO: 1527 - DNA, 79 bp, Artificial Sequence
  Description of Artificial Sequence: Synthetic primer
aaaaaaagcaccgactcggtgccactttttcaagttgataacggactagggttattttaacttgctatttctagctcta

SEQ ID NO: 1528 - DNA, 79 bp, Artificial Sequence
  Description of Artificial Sequence: Synthetic primer
aaaaaaagcaccgactcggtgccactttttcaagttgataacccactagggttattttaacttgctatttctagctcta

SEQ ID NO: 1529 - DNA, 79 bp, Artificial Sequence
  Description of Artificial Sequence: Synthetic primer
aaaaaaagcaccgactcggtgccactttttcaagttgataacccactagccttattttaacttgctatttctagctcta

SEQ ID NO: 1530 - DNA, 79 bp, Artificial Sequence
  Description of Artificial Sequence: Synthetic primer
aaaaaaagcaccgactcggtgccactttttcaagttgataacttactagccttattttaacttgctatttctagctcta

SEQ ID NO: 1531 - DNA, 79 bp, Artificial Sequence
  Description of Artificial Sequence: Synthetic primer
aaaaaaagcaccgactcggtgccactttttcaagttgataacaaactagccttattttaacttgctatttctagctcta

SEQ ID NO: 1532 - DNA, 79 bp, Artificial Sequence
  Description of Artificial Sequence: Synthetic primer
aaaaaaagcaccgactcggtgccactttttcaagttgataacgaactagtcttattttaacttgctatttctagctcta

SEQ ID NO: 1533 - DNA, 36 bp, Artificial Sequence
  Description of Artificial Sequence: Synthetic primer
aaaaaaccttattttaacttgctatttctagctcta

SEQ ID NO: 1534 - DNA, 40 bp, Artificial Sequence
  Description of Artificial Sequence: Synthetic primer
aaaaaactagccttattttaacttgctatttctagctcta

SEQ ID NO: 1535 - DNA, 44 bp, Artificial Sequence
  Description of Artificial Sequence: Synthetic primer
aaaaaacggactagccttattttaacttgctatttctagctcta

SEQ ID NO: 1536 - DNA, 48 bp, Artificial Sequence
  Description of Artificial Sequence: Synthetic primer
aaaaaaataacggactagccttattttaacttgctatttctagctcta

SEQ ID NO: 1537 - DNA, 81 bp, Artificial Sequence
  Description of Artificial Sequence: Synthetic primer
aaaaaaagcaccgactcggtgccactttttcaagttgataacgggactagcccttattttaacttgctatttctagctcta

SEQ ID NO: 1538 - DNA, 83 bp, Artificial Sequence
  Description of Artificial Sequence: Synthetic primer
aaaaaaagcaccgactcggtgccactttttcaagttgataacggggactagccccttattttaacttgctatttctagctcta

SEQ ID NO: 1539 - DNA, 85 bp, Artificial Sequence
  Description of Artificial Sequence: Synthetic primer
aaaaaaagcaccgactcggtgccactttttcaagttgataacgggggactagcccccttattttaacttgctatttctagctcta

SEQ ID NO: 1540 - DNA, 79 bp, Artificial Sequence
  Description of Artificial Sequence: Synthetic primer
aaaaaaagcaccgactcggtgccactttttcaagttgataacaaactagttttattttaacttgctatttctagctcta

SEQ ID NO: 1541 - DNA, 81 bp, Artificial Sequence
  Description of Artificial Sequence: Synthetic primer
aaaaaaagcaccgactcggtgccactttttcaagttgataacggaactagtccttattttaacttgctatttctagctcta

SEQ ID NO: 1542 - DNA, 79 bp, Artificial Sequence
  Description of Artificial Sequence: Synthetic primer
aaaaaaagcaccgactcggtgccactttttcaagttgataacggactagccttattttaacttgctatttctagctcta

SEQ ID NO: 1543 - DNA, 80 bp, Artificial Sequence
  Description of Artificial Sequence: Synthetic primer
aaaaaaagcaccgactcggtgccactttttcaagttgataacaggactagccttattttaacttgctatttctagctcta

SEQ ID NO: 1544 - DNA, 79 bp, Artificial Sequence
  Description of Artificial Sequence: Synthetic primer
aaaaaaagcaccgactcggtgccactttttcaagttgataacagactagctttattttaacttgctatttctagctcta

SEQ ID NO: 1545 - DNA, 81 bp, Artificial Sequence
  Description of Artificial Sequence: Synthetic primer
aaaaaaagcaccgactcggtgccactttttcaagttgataacgggactagaccttattttaacttgctatttctagctcta

SEQ ID NO: 1546 - DNA, 83 bp, Artificial Sequence
  Description of Artificial Sequence: Synthetic primer
aaaaaaagcaccgactcggtgccactttttcaagttgataacggcgactagtaccttattttaacttgctatttctagctcta

SEQ ID NO: 1547 - DNA, 85 bp, Artificial Sequence
  Description of Artificial Sequence: Synthetic primer
aaaaaaagcaccgactcggtgccactttttcaagttgataacggcgcactagataccttattttaacttgctatttctagctcta

SEQ ID NO: 1548 - DNA, 79 bp, Artificial Sequence; identical to SEQ ID NO: 1542
  Description of Artificial Sequence: Synthetic primer

SEQ ID NO: 1549 - DNA, 67 bp, Artificial Sequence
  Description of Artificial Sequence: Synthetic primer
gttttagagctagaaatagcaagttaaaataaggctagtccgttatcaatggcaccgagtcggtgct

SEQ ID NO: 1550 - DNA, 68 bp, Artificial Sequence
  Description of Artificial Sequence: Synthetic primer
gttttagagctagaaatagcaagttaaaataaggctagtccgttatcaactggcaccgagtcggtgct

SEQ ID NO: 1551 - DNA, 69 bp, Artificial Sequence
  Description of Artificial Sequence: Synthetic primer
gttttagagctagaaatagcaagttaaaataaggctagtccgttatcaacttggcaccgagtcggtgct

SEQ ID NO: 1552 - DNA, 50 bp, Artificial Sequence
  Description of Artificial Sequence: Synthetic primer
aaaaaaagcaccgactcggtgccactttttcaagttgataacggactagc

SEQ ID NO: 1553 - DNA, 23 bp, Artificial Sequence
  Description of Artificial Sequence: Synthetic primer
aaaaaaagcaccgactcggtgcc

SEQ ID NO: 1554 - DNA, 116 bp, Artificial Sequence
  Description of Artificial Sequence: Synthetic polynucleotide
agtaataatacgactcactatagggggccactagggacaggatgttttagagctagaaatagcaagttaaaataaggctagtccgttatcaatggcaccgagtcggtgcttttttt

SEQ ID NO: 1555 - DNA, 117 bp, Artificial Sequence
  Description of Artificial Sequence: Synthetic polynucleotide
agtaataatacgactcactatagggggccactagggacaggatgttttagagctagaaatagcaagttaaaataaggctagtccgttatcaactggcaccgagtcggtgcttttttt

SEQ ID NO: 1556 - DNA, 118 bp, Artificial Sequence
  Description of Artificial Sequence: Synthetic polynucleotide
agtaataatacgactcactatagggggccactagggacaggatgttttagagctagaaatagcaagttaaaataaggctagtccgttatcaacttggcaccgagtcggtgcttttttt

SEQ ID NO: 1557 - DNA, 121 bp, Artificial Sequence
  Description of Artificial Sequence: Synthetic polynucleotide
agtaataatacgactcactatagggggccactagggacaggatgttttagagctagaaatagcaagttaaaataaggctagtccgttatcaacttgaaaaagtggtccttttttttttttt

SEQ ID NO: 1558 - DNA, 120 bp, Artificial Sequence
  Description of Artificial Sequence: Synthetic polynucleotide
agtaataatacgactcactatagggggccactagggacaggatgttttagagctagaaatagcaagttaaaataaggctagtccgttatcaacttgaaaaagtggtcttttttttttttt

SEQ ID NO: 1559 - DNA, 119 bp, Artificial Sequence
  Description of Artificial Sequence: Synthetic polynucleotide
agtaataatacgactcactatagggggccactagggacaggatgttttagagctagaaatagcaagttaaaataaggctagtccgttatcaacttgaaaaagtggcttttttttttttt

SEQ ID NO: 1560 - DNA, 123 bp, Artificial Sequence
  Description of Artificial Sequence: Synthetic polynucleotide
agtaataatacgactcactatagggggccactagggacaggatgttttagagctagaaatagcaagttaaaataaggctagtccgtcaacttgaaaaagtggcaccgagtcggtgcttttttt

SEQ ID NO: 1561 - DNA, 124 bp, Artificial Sequence
  Description of Artificial Sequence: Synthetic polynucleotide
agtaataatacgactcactatagggggccactagggacaggatgttttagagctagaaatagcaagttaaaataaggctagtccgtacaacttgaaaaagtggcaccgagtcggtgcttttttt

SEQ ID NO: 1562 - DNA, 125 bp, Artificial Sequence
  Description of Artificial Sequence: Synthetic polynucleotide
agtaataatacgactcactatagggggccactagggacaggatgttttagagctagaaatagcaagttaaaataaggctagtccgtatcaacttgaaaaagtggcaccgagtcggtgcttttttt

SEQ ID NO: 1563 - DNA, 127 bp, Artificial Sequence
  Description of Artificial Sequence: Synthetic polynucleotide
agtaataatacgactcactatagggggccactagggacaggatgttttagagctagaaatagcaagttaaaataaggctagtccgttatcgaacttgaaaaagtggcaccgagtcggtgcttttttt

SEQ ID NO: 1564 - DNA, 128 bp, Artificial Sequence
  Description of Artificial Sequence: Synthetic polynucleotide
agtaataatacgactcactatagggggccactagggacaggatgttttagagctagaaatagcaagttaaaataaggctagtccgttatcgcaacttgaaaaagtggcaccgagtcggtgcttttttt

SEQ ID NO: 1565 - DNA, 129 bp, Artificial Sequence
  Description of Artificial Sequence: Synthetic polynucleotide
agtaataatacgactcactatagggggccactagggacaggatgttttagagctagaaatagcaagttaaaataaggctagtccgttatctgcaacttgaaaaagtggcaccgagtcggtgcttttttt

SEQ ID NO: 1566 - DNA, 129 bp, Artificial Sequence
  Description of Artificial Sequence: Synthetic polynucleotide
agtaataatacgactcactatagggggccactagggacaggatgttttagagctagaaatagcaagttaaaataaggctagcagtccgttatcaacttgaaaaagtggcaccgagtcggtgcttttttt

SEQ ID NO: 1567 - DNA, 132 bp, Artificial Sequence
  Description of Artificial Sequence: Synthetic polynucleotide
agtaataatacgactcactatagggggccactagggacaggatgttttagagctagaaatagcaagttaaaataaggctatgactagtccgttatcaacttgaaaaagtggcaccgagtcggtgcttttttt

SEQ ID NO: 1568 - DNA, 135 bp, Artificial Sequence
  Description of Artificial Sequence: Synthetic polynucleotide
agtaataatacgactcactatagggggccactagggacaggatgttttagagctagaaatagcaagttaaaataaggctactgaaacaggtccgttatcaacttgaaaaagtggcaccgagtcggtgcttttttt

SEQ ID NO: 1569 - DNA, 140 bp, Artificial Sequence
  Description of Artificial Sequence: Synthetic polynucleotide
agtaataatacgactcactatagggggccactagggacaggatgttttagagctagaaatagcaagttaaaataaggctaggatttcaatccaagtccgttatcaacttgaaaaagtggcaccgagtcggtgcttttttt

SEQ ID NO: 1570 - DNA, 126 bp, Artificial Sequence
  Description of Artificial Sequence: Synthetic polynucleotide
agtaataatacgactcactatagggggccactagggacaggatgtctcagagctagaaatagcaagttgagataaggctagtccgttatcaacttgaaaaagtggcaccgagtcggtgcttttttt

SEQ ID NO: 1571 - DNA, 126 bp, Artificial Sequence
  Description of Artificial Sequence: Synthetic polynucleotide
agtaataatacgactcactatagggggccactagggacaggatgtctcagagctagaaatagcaagttgagataaggctagtccgttatcaacttgcataagtggcaccgagtcggtgcttttttt

SEQ ID NO: 1572 - DNA, 127 bp, Artificial Sequence
  Description of Artificial Sequence: Synthetic polynucleotide
agtaataatacgactcactatagggggccactagggacaggatgtctcagagctagaaatagcaagttgagataaggctagtccgttatcaacttgtataaagtggcaccgagtcggtgcttttttt

SEQ ID NO: 1573 - DNA, 151 bp, Artificial Sequence
  Description of Artificial Sequence: Synthetic polynucleotide
agtaataatacgactcactatagggagagttcactgccgtataggcagggggccactagggacaggatgtctcagagctagaaatagcaagttgagataaggctagtccgttatcaacttgcataagtggcaccgagtcggtgcttttttt

SEQ ID NO: 1574 - DNA, 151 bp, Artificial Sequence
  Description of Artificial Sequence: Synthetic polynucleotide
agtaataatacgactcactatagggagagttcactgccgtataggcagagggccactagggacaggatgtctcagagctagaaatagcaagttgagataaggctagtccgttatcaacttgcataagtggcaccgagtcggtgcttttttt

SEQ ID NO: 1575 - DNA, 151 bp, Artificial Sequence
  Description of Artificial Sequence: Synthetic polynucleotide
agtaataatacgactcactatagggagagttcactgccgtataggcagtgggccactagggacaggatgtctcagagctagaaatagcaagttgagataaggctagtccgttatcaacttgcataagtggcaccgagtcggtgcttttttt

SEQ ID NO: 1576 - DNA, 151 bp, Artificial Sequence
  Description of Artificial Sequence: Synthetic polynucleotide
agtaataatacgactcactatagggagagttcactgccgtataggcagcgggccactagggacaggatgtctcagagctagaaatagcaagttgagataaggctagtccgttatcaacttgcataagtggcaccgagtcggtgcttttttt

SEQ ID NO: 1577 - DNA, 124 bp, Artificial Sequence
  Description of Artificial Sequence: Synthetic polynucleotide
agtaataatacgactcactatagggggccactagggacaggatgtctcagagctagaaatagcaagttgagataaggctagtccgttatcaactgcatagtggcaccgagtcggtgcttttttt

SEQ ID NO: 1578 - DNA, 122 bp, Artificial Sequence
  Description of Artificial Sequence: Synthetic polynucleotide
agtaataatacgactcactatagggggccactagggacaggatgtctcagagctagaaatagcaagttgagataaggctagtccgttatcaactcatgtggcaccgagtcggtgcttttttt

SEQ ID NO: 1579 - DNA, 120 bp, Artificial Sequence
  Description of Artificial Sequence: Synthetic polynucleotide
agtaataatacgactcactatagggggccactagggacaggatgtctcagagctagaaatagcaagttgagataaggctagtccgttatcaactattggcaccgagtcggtgcttttttt

SEQ ID NO: 1580 - DNA, 118 bp, Artificial Sequence
  Description of Artificial Sequence: Synthetic polynucleotide
agtaataatacgactcactatagggggccactagggacaggatgtctcagagctagaaatagcaagttgagataaggctagtccgttatcaacttggcaccgagtcggtgcttttttt

SEQ ID NO: 1581 - DNA, 122 bp, Artificial Sequence
  Description of Artificial Sequence: Synthetic polynucleotide
agtaataatacgactcactatagggggccactagggacaggatgtctcagagctagaaatagcaagttgagataaggctagtccgttatcaacttgcataagtggcacagtgtgcttttttt

SEQ ID NO: 1582 - DNA, 118 bp, Artificial Sequence
  Description of Artificial Sequence: Synthetic polynucleotide
agtaataatacgactcactatagggggccactagggacaggatgtctcagagctagaaatagcaagttgagataaggctagtccgttatcaacttgcataagtggcagtgcttttttt

SEQ ID NO: 1583 - DNA, 114 bp, Artificial Sequence
  Description of Artificial Sequence: Synthetic polynucleotide
agtaataatacgactcactatagggggccactagggacaggatgtctcagagctagaaatagcaagttgagataaggctagtccgttatcaacttgcataagtgagtttttttt

SEQ ID NO: 1584 - DNA, 112 bp, Artificial Sequence
  Description of Artificial Sequence: Synthetic polynucleotide
agtaataatacgactcactatagggggccactagggacaggatgtctcagagctagaaatagcaagttgagataaggctagtccgttatcaacttgcataagtggttttttt

SEQ ID NO: 1585 - DNA, 123 bp, Artificial Sequence
  Description of Artificial Sequence: Synthetic polynucleotide
agtaataatacgactcactatagggggccactagggacaggatgtctcagagtagaaatacaagttgagataaggctagtccgttatcaacttgcataagtgcaccgagtcggtgcttttttt

SEQ ID NO: 1586 - DNA, 121 bp, Artificial Sequence
  Description of Artificial Sequence: Synthetic polynucleotide
agtaataatacgactcactatagggggccactagggacaggatgtctcagagagaaatcaagttgagataaggctagtccgttatcaacttgcataagtgcaccgagtcggtgcttttttt

SEQ ID NO: 1587 - DNA, 120 bp, Artificial Sequence
  Description of Artificial Sequence: Synthetic polynucleotide
agtaataatacgactcactatagggggccactagggacaggatgtctcagagagaatcaagttgagataaggctagtccgttatcaacttgcataagtgcaccgagtcggtgcttttttt

SEQ ID NO: 1588 - DNA, 116 bp, Artificial Sequence
  Description of Artificial Sequence: Synthetic polynucleotide
agtaataatacgactcactatagggggccactagggacaggatgtctcagagacaagttgagataaggctagtccgttatcaacttgcataagtgcaccgagtcggtgcttttttt

SEQ ID NO: 1589 - DNA, 120 bp, Artificial Sequence
  Description of Artificial Sequence: Synthetic polynucleotide
agtaataatacgactcactatagggggccactagggacaggatgtctcagagctagaaatagcaagttgagataaggctagtccgttatcaactgcatagtggcacagtgtgcttttttt

SEQ ID NO: 1590 - DNA, 114 bp, Artificial Sequence
  Description of Artificial Sequence: Synthetic polynucleotide
agtaataatacgactcactatagggggccactagggacaggatgtctcagagctagaaatagcaagttgagataaggctagtccgttatcaactcatgtggcagtgcttttttt

SEQ ID NO: 1591 - DNA, 108 bp, Artificial Sequence
  Description of Artificial Sequence: Synthetic polynucleotide
agtaataatacgactcactatagggggccactagggacaggatgtctcagagctagaaatagcaagttgagataaggctagtccgttatcaactattgagtttttttt

SEQ ID NO: 1592 - DNA, 104 bp, Artificial Sequence
  Description of Artificial Sequence: Synthetic polynucleotide
agtaataatacgactcactatagggggccactagggacaggatgtctcagagctagaaatagcaagttgagataaggctagtccgttatcaacttggttttttt

SEQ ID NO: 1593 - DNA, 121 bp, Artificial Sequence
  Description of Artificial Sequence: Synthetic polynucleotide
agtaataatacgactcactatagggggccactagggacaggatgtctcagagtagaaatacaagttgagataaggctagtccgttatcaactgcatagtgcaccgagtcggtgcttttttt

SEQ ID NO: 1594 - DNA, 117 bp, Artificial Sequence
  Description of Artificial Sequence: Synthetic polynucleotide
agtaataatacgactcactatagggggccactagggacaggatgtctcagagagaaatcaagttgagataaggctagtccgttatcaactcatgtgcaccgagtcggtgcttttttt

SEQ ID NO: 1595 - DNA, 114 bp, Artificial Sequence
  Description of Artificial Sequence: Synthetic polynucleotide
agtaataatacgactcactatagggggccactagggacaggatgtctcagagagaatcaagttgagataaggctagtccgttatcaactattgcaccgagtcggtgcttttttt

SEQ ID NO: 1596 - DNA, 108 bp, Artificial Sequence
  Description of Artificial Sequence: Synthetic polynucleotide
agtaataatacgactcactatagggggccactagggacaggatgtctcagagacaagttgagataaggctagtccgttatcaacttgcaccgagtcggtgcttttttt

SEQ ID NO: 1597 - DNA, 118 bp, Artificial Sequence
  Description of Artificial Sequence: Synthetic polynucleotide
agtaataatacgactcactatagggggccactagggacaggatgtctcagagtagaaatacaagttgagataaggctagtccgttatcaactgcatagtggcacagtgtgcttttttt

SEQ ID NO: 1598 - DNA, 110 bp, Artificial Sequence
  Description of Artificial Sequence: Synthetic polynucleotide
agtaataatacgactcactatagggggccactagggacaggatgtctcagagagaaatcaagttgagataaggctagtccgttatcaactcatgtggcagtgcttttttt

SEQ ID NO: 1599 - DNA, 103 bp, Artificial Sequence
  Description of Artificial Sequence: Synthetic polynucleotide
agtaataatacgactcactatagggggccactagggacaggatgtctcagagagaatcaagttgagataaggctagtccgttatcaactattgagtttttttt

SEQ ID NO: 1600 - DNA, 95 bp, Artificial Sequence
  Description of Artificial Sequence: Synthetic oligonucleotide
agtaataatacgactcactatagggggccactagggacaggatgtctcagagacaagttgagataaggctagtccgttatcaacttggttttttt

SEQ ID NO: 1601 - DNA, 126 bp, Artificial Sequence
  Description of Artificial Sequence: Synthetic polynucleotide
agtaataatacgactcactataggagtccgagcagaagaagaagtctcagagctagaaatagcaagttgagataaggctagtccgttatcaacttgaaaaagtggcaccgagtcggtgcttttttt

SEQ ID NO: 1602 - DNA, 126 bp, Artificial Sequence
  Description of Artificial Sequence: Synthetic polynucleotide
agtaataatacgactcactataggagtccgagcagaagaagaagtctcagagctagaaatagcaagttgagataaggctagtccgttatcaacttgcataagtggcaccgagtcggtgcttttttt

SEQ ID NO: 1603 - DNA, 127 bp, Artificial Sequence
  Description of Artificial Sequence: Synthetic polynucleotide
agtaataatacgactcactataggagtccgagcagaagaagaagtctcagagctagaaatagcaagttgagataaggctagtccgttatcaacttgtataaagtggcaccgagtcggtgcttttttt

SEQ ID NO: 1604 - DNA, 151 bp, Artificial Sequence
  Description of Artificial Sequence: Synthetic polynucleotide
agtaataatacgactcactatagggagagttcactgccgtataggcaggagtccgagcagaagaagaagtctcagagctagaaatagcaagttgagataaggctagtccgttatcaacttgcataagtggcaccgagtcggtgcttttttt

SEQ ID NO: 1605 - DNA, 151 bp, Artificial Sequence
  Description of Artificial Sequence: Synthetic polynucleotide
agtaataatacgactcactatagggagagttcactgccgtataggcagaagtccgagcagaagaagaagtctcagagctagaaatagcaagttgagataaggctagtccgttatcaacttgcataagtggcaccgagtcggtgcttttttt

SEQ ID NO: 1606 - DNA, 151 bp, Artificial Sequence
  Description of Artificial Sequence: Synthetic polynucleotide
agtaataatacgactcactatagggagagttcactgccgtataggcagtagtccgagcagaagaagaagtctcagagctagaaatagcaagttgagataaggctagtccgttatcaacttgcataagtggcaccgagtcggtgcttttttt

SEQ ID NO: 1607 - DNA, 151 bp, Artificial Sequence
  Description of Artificial Sequence: Synthetic polynucleotide
agtaataatacgactcactatagggagagttcactgccgtataggcagcagtccgagcagaagaagaagtctcagagctagaaatagcaagttgagataaggctagtccgttatcaacttgcataagtggcaccgagtcggtgcttttttt

SEQ ID NO: 1608 - DNA, 124 bp, Artificial Sequence
  Description of Artificial Sequence: Synthetic polynucleotide
agtaataatacgactcactataggagtccgagcagaagaagaagtctcagagctagaaatagcaagttgagataaggctagtccgttatcaactgcatagtggcaccgagtcggtgcttttttt

SEQ ID NO: 1609 - DNA, 122 bp, Artificial Sequence
  Description of Artificial Sequence: Synthetic polynucleotide
agtaataatacgactcactataggagtccgagcagaagaagaagtctcagagctagaaatagcaagttgagataaggctagtccgttatcaactcatgtggcaccgagtcggtgcttttttt

SEQ ID NO: 1610 - DNA, 120 bp, Artificial Sequence
  Description of Artificial Sequence: Synthetic polynucleotide
agtaataatacgactcactataggagtccgagcagaagaagaagtctcagagctagaaatagcaagttgagataaggctagtccgttatcaactattggcaccgagtcggtgcttttttt

SEQ ID NO: 1611 - DNA, 118 bp, Artificial Sequence
  Description of Artificial Sequence: Synthetic polynucleotide
agtaataatacgactcactataggagtccgagcagaagaagaagtctcagagctagaaatagcaagttgagataaggctagtccgttatcaacttggcaccgagtcggtgcttttttt

SEQ ID NO: 1612 - DNA, 122 bp, Artificial Sequence
  Description of Artificial Sequence: Synthetic polynucleotide
agtaataatacgactcactataggagtccgagcagaagaagaagtctcagagctagaaatagcaagttgagataaggctagtccgttatcaacttgcataagtggcacagtgtgcttttttt

SEQ ID NO: 1613 - DNA, 118 bp, Artificial Sequence
  Description of Artificial Sequence: Synthetic polynucleotide
agtaataatacgactcactataggagtccgagcagaagaagaagtctcagagctagaaatagcaagttgagataaggctagtccgttatcaacttgcataagtggcagtgcttttttt

SEQ ID NO: 1614 - DNA, 114 bp, Artificial Sequence
  Description of Artificial Sequence: Synthetic polynucleotide
agtaataatacgactcactataggagtccgagcagaagaagaagtctcagagctagaaatagcaagttgagataaggctagtccgttatcaacttgcataagtgagtttttttt

SEQ ID NO: 1615 - DNA, 112 bp, Artificial Sequence
  Description of Artificial Sequence: Synthetic polynucleotide
agtaataatacgactcactataggagtccgagcagaagaagaagtctcagagctagaaatagcaagttgagataaggctagtccgttatcaacttgcataagtggttttttt

SEQ ID NO: 1616 - DNA, 123 bp, Artificial Sequence
  Description of Artificial Sequence: Synthetic polynucleotide
agtaataatacgactcactataggagtccgagcagaagaagaagtctcagagtagaaatacaagttgagataaggctagtccgttatcaacttgcataagtgcaccgagtcggtgcttttttt

SEQ ID NO: 1617 - DNA, 121 bp, Artificial Sequence
  Description of Artificial Sequence: Synthetic polynucleotide
agtaataatacgactcactataggagtccgagcagaagaagaagtctcagagagaaatcaagttgagataaggctagtccgttatcaacttgcataagtgcaccgagtcggtgcttttttt

SEQ ID NO: 1618 - DNA, 120 bp, Artificial Sequence
  Description of Artificial Sequence: Synthetic polynucleotide
agtaataatacgactcactataggagtccgagcagaagaagaagtctcagagagaatcaagttgagataaggctagtccgttatcaacttgcataagtgcaccgagtcggtgcttttttt

SEQ ID NO: 1619 - DNA, 116 bp, Artificial Sequence
  Description of Artificial Sequence: Synthetic polynucleotide
agtaataatacgactcactataggagtccgagcagaagaagaagtctcagagacaagttgagataaggctagtccgttatcaacttgcataagtgcaccgagtcggtgcttttttt

SEQ ID NO: 1620 - DNA, 120 bp, Artificial Sequence
  Description of Artificial Sequence: Synthetic polynucleotide
agtaataatacgactcactataggagtccgagcagaagaagaagtctcagagctagaaatagcaagttgagataaggctagtccgttatcaactgcatagtggcacagtgtgcttttttt

SEQ ID NO: 1621 - DNA, 114 bp, Artificial Sequence
  Description of Artificial Sequence: Synthetic polynucleotide
agtaataatacgactcactataggagtccgagcagaagaagaagtctcagagctagaaatagcaagttgagataaggctagtccgttatcaactcatgtggcagtgcttttttt

SEQ ID NO: 1622 - DNA, 108 bp, Artificial Sequence
  Description of Artificial Sequence: Synthetic polynucleotide
agtaataatacgactcactataggagtccgagcagaagaagaagtctcagagctagaaatagcaagttgagataaggctagtccgttatcaactattgagtttttttt

SEQ ID NO: 1623 - DNA, 104 bp, Artificial Sequence
  Description of Artificial Sequence: Synthetic polynucleotide
agtaataatacgactcactataggagtccgagcagaagaagaagtctcagagctagaaatagcaagttgagataaggctagtccgttatcaacttggttttttt

SEQ ID NO: 1624 - DNA, 121 bp, Artificial Sequence
  Description of Artificial Sequence: Synthetic polynucleotide
agtaataatacgactcactataggagtccgagcagaagaagaagtctcagagtagaaatacaagttgagataaggctagtccgttatcaactgcatagtgcaccgagtcggtgcttttttt

SEQ ID NO: 1625 - DNA, 117 bp, Artificial Sequence
  Description of Artificial Sequence: Synthetic polynucleotide
agtaataatacgactcactataggagtccgagcagaagaagaagtctcagagagaaatcaagttgagataaggctagtccgttatcaactcatgtgcaccgagtcggtgcttttttt

SEQ ID NO: 1626 - DNA, 114 bp, Artificial Sequence
  Description of Artificial Sequence: Synthetic polynucleotide
agtaataatacgactcactataggagtccgagcagaagaagaagtctcagagagaatcaagttgagataaggctagtccgttatcaactattgcaccgagtcggtgcttttttt

SEQ ID NO: 1627 - DNA, 108 bp, Artificial Sequence
  Description of Artificial Sequence: Synthetic polynucleotide
agtaataatacgactcactataggagtccgagcagaagaagaagtctcagagacaagttgagataaggctagtccgttatcaacttgcaccgagtcggtgcttttttt

SEQ ID NO: 1628 - DNA, 118 bp, Artificial Sequence
  Description of Artificial Sequence: Synthetic polynucleotide
agtaataatacgactcactataggagtccgagcagaagaagaagtctcagagtagaaatacaagttgagataaggctagtccgttatcaactgcatagtggcacagtgtgcttttttt

SEQ ID NO: 1629 - DNA, 110 bp, Artificial Sequence
  Description of Artificial Sequence: Synthetic polynucleotide
agtaataatacgactcactataggagtccgagcagaagaagaagtctcagagagaaatcaagttgagataaggctagtccgttatcaactcatgtggcagtgcttttttt

SEQ ID NO: 1630 - DNA, 103 bp, Artificial Sequence
  Description of Artificial Sequence: Synthetic polynucleotide
agtaataatacgactcactataggagtccgagcagaagaagaagtctcagagagaatcaagttgagataaggctagtccgttatcaactattgagtttttttt

SEQ ID NO: 1631 - DNA, 95 bp, Artificial Sequence
  Description of Artificial Sequence: Synthetic oligonucleotide
agtaataatacgactcactataggagtccgagcagaagaagaagtctcagagacaagttgagataaggctagtccgttatcaacttggttttttt

SEQ ID NO: 1632 - DNA, 126 bp, Artificial Sequence
  Description of Artificial Sequence: Synthetic polynucleotide
agtaataatacgactcactataggggtggggggagtttgctccgtctcagagctagaaatagcaagttgagataaggctagtccgttatcaacttgaaaaagtggcaccgagtcggtgcttttttt

SEQ ID NO: 1633 - DNA, 126 bp, Artificial Sequence
  Description of Artificial Sequence: Synthetic polynucleotide
agtaataatacgactcactataggggtggggggagtttgctccgtctcagagctagaaatagcaagttgagataaggctagtccgttatcaacttgcataagtggcaccgagtcggtgcttttttt

SEQ ID NO: 1634 - DNA, 127 bp, Artificial Sequence
  Description of Artificial Sequence: Synthetic polynucleotide
agtaataatacgactcactataggggtggggggagtttgctccgtctcagagctagaaatagcaagttgagataaggctagtccgttatcaacttgtataaagtggcaccgagtcggtgcttttttt

SEQ ID NO: 1635 - DNA, 151 bp, Artificial Sequence
  Description of Artificial Sequence: Synthetic polynucleotide
agtaataatacgactcactatagggagagttcactgccgtataggcaggggtggggggagtttgctccgtctcagagctagaaatagcaagttgagataaggctagtccgttatcaacttgcataagtggcaccgagtcggtgcttttttt

SEQ ID NO: 1636 - DNA, 151 bp, Artificial Sequence
  Description of Artificial Sequence: Synthetic polynucleotide
agtaataatacgactcactatagggagagttcactgccgtataggcagaggtggggggagtttgctccgtctcagagctagaaatagcaagttgagataaggctagtccgttatcaacttgcataagtggcaccgagtcggtgcttttttt

SEQ ID NO: 1637 - DNA, 151 bp, Artificial Sequence
  Description of Artificial Sequence: Synthetic polynucleotide
agtaataatacgactcactatagggagagttcactgccgtataggcagtggtggggggagtttgctccgtctcagagctagaaatagcaagttgagataaggctagtccgttatcaacttgcataagtggcaccgagtcggtgcttttttt

SEQ ID NO: 1638 - DNA, 151 bp, Artificial Sequence
  Description of Artificial Sequence: Synthetic polynucleotide
agtaataatacgactcactatagggagagttcactgccgtataggcagcggtggggggagtttgctccgtctcagagctagaaatagcaagttgagataaggctagtccgttatcaacttgcataagtggcaccgagtcggtgcttttttt

SEQ ID NO: 1639 - DNA, 124 bp, Artificial Sequence
  Description of Artificial Sequence: Synthetic polynucleotide
agtaataatacgactcactataggggtggggggagtttgctccgtctcagagctagaaatagcaagttgagataaggctagtccgttatcaactgcatagtggcaccgagtcggtgcttttttt

SEQ ID NO: 1640 - DNA, 122 bp, Artificial Sequence
  Description of Artificial Sequence: Synthetic polynucleotide
agtaataatacgactcactataggggtggggggagtttgctccgtctcagagctagaaatagcaagttgagataaggctagtccgttatcaactcatgtggcaccgagtcggtgcttttttt

SEQ ID NO: 1641 - DNA, 120 bp, Artificial Sequence
  Description of Artificial Sequence: Synthetic polynucleotide
agtaataatacgactcactataggggtggggggagtttgctccgtctcagagctagaaatagcaagttgagataaggctagtccgttatcaactattggcaccgagtcggtgcttttttt

SEQ ID NO: 1642 - DNA, 118 bp, Artificial Sequence
  Description of Artificial Sequence: Synthetic polynucleotide
agtaataatacgactcactataggggtggggggagtttgctccgtctcagagctagaaatagcaagttgagataaggctagtccgttatcaacttggcaccgagtcggtgcttttttt

SEQ ID NO: 1643 - DNA, 122 bp, Artificial Sequence
  Description of Artificial Sequence: Synthetic polynucleotide
agtaataatacgactcactataggggtggggggagtttgctccgtctcagagctagaaatagcaagttgagataaggctagtccgttatcaacttgcataagtggcacagtgtgcttttttt

SEQ ID NO: 1644 - DNA, 118 bp, Artificial Sequence
  Description of Artificial Sequence: Synthetic polynucleotide
agtaataatacgactcactataggggtggggggagtttgctccgtctcagagctagaaatagcaagttgagataaggctagtccgttatcaacttgcataagtggcagtgcttttttt

SEQ ID NO: 1645 - DNA, 114 bp, Artificial Sequence
  Description of Artificial Sequence: Synthetic polynucleotide
agtaataatacgactcactataggggtggggggagtttgctccgtctcagagctagaaatagcaagttgagataaggctagtccgttatcaacttgcataagtgagtttttttt

SEQ ID NO: 1646 - DNA, 112 bp, Artificial Sequence
  Description of Artificial Sequence: Synthetic polynucleotide
agtaataatacgactcactataggggtggggggagtttgctccgtctcagagctagaaatagcaagttgagataaggctagtccgttatcaacttgcataagtggttttttt

SEQ ID NO: 1647 - DNA, 123 bp, Artificial Sequence
  Description of Artificial Sequence: Synthetic polynucleotide
agtaataatacgactcactataggggtggggggagtttgctccgtctcagagtagaaatacaagttgagataaggctagtccgttatcaacttgcataagtgcaccgagtcggtgcttttttt

SEQ ID NO: 1648 - DNA, 121 bp, Artificial Sequence
  Description of Artificial Sequence: Synthetic polynucleotide
agtaataatacgactcactataggggtggggggagtttgctccgtctcagagagaaatcaagttgagataaggctagtccgttatcaacttgcataagtgcaccgagtcggtgcttttttt

SEQ ID NO: 1649 - DNA, 120 bp, Artificial Sequence
  Description of Artificial Sequence: Synthetic polynucleotide
agtaataatacgactcactataggggtggggggagtttgctccgtctcagagagaatcaagttgagataaggctagtccgttatcaacttgcataagtgcaccgagtcggtgcttttttt

SEQ ID NO: 1650 - DNA, 116 bp, Artificial Sequence
  Description of Artificial Sequence: Synthetic polynucleotide
agtaataatacgactcactataggggtggggggagtttgctccgtctcagagacaagttgagataaggctagtccgttatcaacttgcataagtgcaccgagtcggtgcttttttt

SEQ ID NO: 1651 - DNA, 120 bp, Artificial Sequence
  Description of Artificial Sequence: Synthetic polynucleotide
agtaataatacgactcactataggggtggggggagtttgctccgtctcagagctagaaatagcaagttgagataaggctagtccgttatcaactgcatagtggcacagtgtgcttttttt

SEQ ID NO: 1652 - DNA, 114 bp, Artificial Sequence
  Description of Artificial Sequence: Synthetic polynucleotide
agtaataatacgactcactataggggtggggggagtttgctccgtctcagagctagaaatagcaagttgagataaggctagtccgttatcaactcatgtggcagtgcttttttt

SEQ ID NO: 1653 - DNA, 108 bp, Artificial Sequence
  Description of Artificial Sequence: Synthetic polynucleotide
agtaataatacgactcactataggggtggggggagtttgctccgtctcagagctagaaatagcaagttgagataaggctagtccgttatcaactattgagtttttttt

SEQ ID NO: 1654 - DNA, 104 bp, Artificial Sequence
  Description of Artificial Sequence: Synthetic polynucleotide
agtaataatacgactcactataggggtggggggagtttgctccgtctcagagctagaaatagcaagttgagataaggctagtccgttatcaacttggttttttt

SEQ ID NO: 1655 - DNA, 121 bp, Artificial Sequence
  Description of Artificial Sequence: Synthetic polynucleotide
agtaataatacgactcactataggggtggggggagtttgctccgtctcagagtagaaatacaagttgagataaggctagtccgttatcaactgcatagtgcaccgagtcggtgcttttttt

SEQ ID NO: 1656 - DNA, 117 bp, Artificial Sequence
  Description of Artificial Sequence: Synthetic polynucleotide
agtaataatacgactcactataggggtggggggagtttgctccgtctcagagagaaatcaagttgagataaggctagtccgttatcaactcatgtgcaccgagtcggtgcttttttt

SEQ ID NO: 1657 - DNA, 114 bp, Artificial Sequence
  Description of Artificial Sequence: Synthetic polynucleotide
agtaataatacgactcactataggggtggggggagtttgctccgtctcagagagaatcaagttgagataaggctagtccgttatcaactattgcaccgagtcggtgcttttttt

SEQ ID NO: 1658 - DNA, 108 bp, Artificial Sequence
  Description of Artificial Sequence: Synthetic polynucleotide
agtaataatacgactcactataggggtggggggagtttgctccgtctcagagacaagttgagataaggctagtccgttatcaacttgcaccgagtcggtgcttttttt

SEQ ID NO: 1659 - DNA, 118 bp, Artificial Sequence
  Description of Artificial Sequence: Synthetic polynucleotide
agtaataatacgactcactataggggtggggggagtttgctccgtctcagagtagaaatacaagttgagataaggctagtccgttatcaactgcatagtggcacagtgtgcttttttt

SEQ ID NO: 1660 - DNA, 110 bp, Artificial Sequence
  Description of Artificial Sequence: Synthetic polynucleotide
agtaataatacgactcactataggggtggggggagtttgctccgtctcagagagaaatcaagttgagataaggctagtccgttatcaactcatgtggcagtgcttttttt

SEQ ID NO: 1661 - DNA, 103 bp, Artificial Sequence
  Description of Artificial Sequence: Synthetic polynucleotide
agtaataatacgactcactataggggtggggggagtttgctccgtctcagagagaatcaagttgagataaggctagtccgttatcaactattgagtttttttt

SEQ ID NO: 1662 - DNA, 95 bp, Artificial Sequence
  Description of Artificial Sequence: Synthetic oligonucleotide
agtaataatacgactcactataggggtggggggagtttgctccgtctcagagacaagttgagataaggctagtccgttatcaacttggttttttt

SEQ ID NO: 1663 - RNA, 100 nt, Artificial Sequence
  Description of Artificial Sequence: Synthetic polynucleotide
ggggccacuagggacaggauguuuuagagcuagaaauagcaaguuaaaauaaggcuaguccguuaucaacuugaaaaaguggcaccgaaucggugcuuuu

SEQ ID NO: 1664 - RNA, 30 nt, Artificial Sequence
  Description of Artificial Sequence: Synthetic oligonucleotide
gacgaugagacggaaacgucaaguaucguu

SEQ ID NO: 1665 - RNA, 10 nt, Artificial Sequence
  Description of Artificial Sequence: Synthetic oligonucleotide
gcaaguuagc

SEQ ID NO: 1666 - RNA, 11 nt, Artificial Sequence
  Description of Artificial Sequence: Synthetic oligonucleotide
agagacaaguu

SEQ ID NO: 1667 - RNA, 15 nt, Artificial Sequence
  Description of Artificial Sequence: Synthetic oligonucleotide
aacuggcuaguccgu

SEQ ID NO: 1668 - RNA, 13 nt, Artificial Sequence
  Description of Artificial Sequence: Synthetic oligonucleotide
aacccuaguccgu

SEQ ID NO: 1669 - RNA, 13 nt, Artificial Sequence
  Description of Artificial Sequence: Synthetic oligonucleotide
aagacuaguucgu

SEQ ID NO: 1670 - RNA, 13 nt, Artificial Sequence
  Description of Artificial Sequence: Synthetic oligonucleotide
aaagcuagucugu

SEQ ID NO: 1671 - RNA, 15 nt, Artificial Sequence
  Description of Artificial Sequence: Synthetic oligonucleotide
aagggcuagucccgu

SEQ ID NO: 1672 - RNA, 13 nt, Artificial Sequence
  Description of Artificial Sequence: Synthetic oligonucleotide
aaggcuucaccgu

SEQ ID NO: 1673 - DNA, 22 bp, Artificial Sequence
  Description of Artificial Sequence: Synthetic oligonucleotide
ggggtgggggggagtttgctcc

SEQ ID NO: 1674 - DNA, 21 bp, Artificial Sequence
  Description of Artificial Sequence: Synthetic oligonucleotide
ggagtccgagcagaagaagaa

SEQ ID NO: 1675 - DNA, 21 bp, Artificial Sequence
  Description of Artificial Sequence: Synthetic oligonucleotide
gggtgggggggagtttgctcc

SEQ ID NO: 1676 - DNA, 20 bp, Artificial Sequence
  Description of Artificial Sequence: Synthetic oligonucleotide
gagtccgagcagaagaagaa

SEQ ID NO: 1677 - DNA, 23 bp, Artificial Sequence
  Description of Artificial Sequence: Synthetic oligonucleotide
  modified_base (21)..(21): a, c, t, g, unknown or other
gggtggggggagtttgctccngg

SEQ ID NO: 1678 - DNA, 23 bp, Artificial Sequence
  Description of Artificial Sequence: Synthetic oligonucleotide
ggatggagggagtttgctcctgg

SEQ ID NO: 1679 - DNA, 23 bp, Artificial Sequence
  Description of Artificial Sequence: Synthetic oligonucleotide
ggggaggggaagtttgctcctgg

SEQ ID NO: 1680 - DNA, 23 bp, Artificial Sequence
  Description of Artificial Sequence: Synthetic oligonucleotide
gggagggtggagtttgctcctgg

SEQ ID NO: 1681 - DNA, 23 bp, Artificial Sequence
  Description of Artificial Sequence: Synthetic oligonucleotide
cgggggagggagtttgctcctgg

SEQ ID NO: 1682 - DNA, 23 bp, Artificial Sequence
  Description of Artificial Sequence: Synthetic oligonucleotide
gagtccgagcagaagaagaaggg

SEQ ID NO: 1683 - DNA, 23 bp, Artificial Sequence
  Description of Artificial Sequence: Synthetic oligonucleotide
gagttagagcagaagaagaaagg

SEQ ID NO: 1684 - DNA, 23 bp, Artificial Sequence
  Description of Artificial Sequence: Synthetic oligonucleotide
aggtactagcagaagaagaaagg

SEQ ID NO: 1685 - DNA, 23 bp, Artificial Sequence
  Description of Artificial Sequence: Synthetic oligonucleotide
acgtctgagcagaagaagaatgg

SEQ ID NO: 1686 - DNA, 23 bp, Artificial Sequence
  Description of Artificial Sequence: Synthetic oligonucleotide
aggtgctagcagaagaagaaggg

SEQ ID NO: 1687 - DNA, 23 bp, Artificial Sequence
  Description of Artificial Sequence: Synthetic oligonucleotide
aatgaccactacatcctcaaggg

SEQ ID NO: 1688 - DNA, 23 bp, Artificial Sequence
  Description of Artificial Sequence: Synthetic oligonucleotide
ggagacatctacatcctcaaagg

SEQ ID NO: 1689 - DNA, 23 bp, Artificial Sequence
  Description of Artificial Sequence: Synthetic oligonucleotide
aagaagcactacatcctcaatgg

SEQ ID NO: 1690 - DNA, 23 bp, Artificial Sequence
  Description of Artificial Sequence: Synthetic oligonucleotide
ttctaccaccacatcctcaaagg

SEQ ID NO: 1691 - DNA, 23 bp, Artificial Sequence
  Description of Artificial Sequence: Synthetic oligonucleotide
tcagagcactgcatcctcaaagg

SEQ ID NO: 1692 - DNA, 23 bp, Artificial Sequence
  Description of Artificial Sequence: Synthetic oligonucleotide
gtcatcttagtcattacctgtgg

SEQ ID NO: 1693 - DNA, 23 bp, Artificial Sequence
  Description of Artificial Sequence: Synthetic oligonucleotide
aagatcacagtcattacctgggg

SEQ ID NO: 1694 - DNA, 23 bp, Artificial Sequence
  Description of Artificial Sequence: Synthetic oligonucleotide
gtcccctcagtcattacctgcgg

SEQ ID NO: 1695 - DNA, 23 bp, Artificial Sequence
  Description of Artificial Sequence: Synthetic oligonucleotide
aatatgttagtcattacctgagg

SEQ ID NO: 1696 - DNA, 23 bp, Artificial Sequence
  Description of Artificial Sequence: Synthetic oligonucleotide
ggtatctaagtcattacctgtgg

SEQ ID NO: 1697 - DNA, 23 bp, Artificial Sequence
  Description of Artificial Sequence: Synthetic oligonucleotide
ggaatcccttctgcagcaccagg

SEQ ID NO: 1698 - DNA, 23 bp, Artificial Sequence
  Description of Artificial Sequence: Synthetic oligonucleotide
ccaagagcttctgcagcacctgg

SEQ ID NO: 1699 - DNA, 23 bp, Artificial Sequence
  Description of Artificial Sequence: Synthetic oligonucleotide
ggaaccccgtctgcagcaccagg

SEQ ID NO: 1700 - DNA, 23 bp, Artificial Sequence
  Description of Artificial Sequence: Synthetic oligonucleotide
ccactcctttctgcagcacccgg

SEQ ID NO: 1701 - DNA, 23 bp, Artificial Sequence
  Description of Artificial Sequence: Synthetic oligonucleotide
aatattccctctgcagcaccagg

SEQ ID NO: 1702 - DNA, 23 bp, Artificial Sequence
  Description of Artificial Sequence: Synthetic oligonucleotide
gggtggggggagtttgctcctgg

SEQ ID NO: 1703 - DNA, 23 bp, Artificial Sequence
  Description of Artificial Sequence: Synthetic oligonucleotide
ggatggagggagtttgctcctgg

SEQ ID NO: 1704 - DNA, 23 bp, Artificial Sequence
  Description of Artificial Sequence: Synthetic oligonucleotide
ggggaggggaagtttgctcctgg

SEQ ID NO: 1705 - DNA, 23 bp, Artificial Sequence
  Description of Artificial Sequence: Synthetic oligonucleotide
gggagggtggagtttgctcctgg

SEQ ID NO: 1706 - DNA, 23 bp, Artificial Sequence
  Description of Artificial Sequence: Synthetic oligonucleotide
cgggggagggagtttgctcctgg

SEQ ID NO: 1707 - DNA, 23 bp, Artificial Sequence
  Description of Artificial Sequence: Synthetic oligonucleotide
gcatgatgcgcggcccaaggagg

SEQ ID NO: 1708 - DNA, 23 bp, Artificial Sequence
  Description of Artificial Sequence: Synthetic oligonucleotide
gcatgattcgcagcccaaggagg

SEQ ID NO: 1709 - DNA, 23 bp, Artificial Sequence
  Description of Artificial Sequence: Synthetic oligonucleotide
tgatggtgcgcagcccaaggagg

SEQ ID NO: 1710 - DNA, 23 bp, Artificial Sequence
  Description of Artificial Sequence: Synthetic oligonucleotide
ccaccatgcccggcccaaggtgg

SEQ ID NO: 1711 - DNA, 23 bp, Artificial Sequence
  Description of Artificial Sequence: Synthetic oligonucleotide
gtttgaggcccggcccaaggagg

SEQ ID NO: 1712 - DNA, 23 bp, Artificial Sequence
  Description of Artificial Sequence: Synthetic oligonucleotide
gaattactcacgccccaaggagg

SEQ ID NO: 1713 - DNA, 23 bp, Artificial Sequence
  Description of Artificial Sequence: Synthetic oligonucleotide
caattaatcacaccccaaggagg

SEQ ID NO: 1714 - DNA, 23 bp, Artificial Sequence
  Description of Artificial Sequence: Synthetic oligonucleotide
ggattattcaggccccaaggcgg

SEQ ID NO: 1715 - DNA, 23 bp, Artificial Sequence
  Description of Artificial Sequence: Synthetic oligonucleotide
tcccctctcacgccccaaggggg

SEQ ID NO: 1716 - DNA, 23 bp, Artificial Sequence
  Description of Artificial Sequence: Synthetic oligonucleotide
gtcccacccacgccccaaggagg

SEQ ID NO: 1717 - DNA, 23 bp, Artificial Sequence
  Description of Artificial Sequence: Synthetic oligonucleotide
tgacatcaattattatacatcgg

SEQ ID NO: 1718 - DNA, 23 bp, Artificial Sequence
  Description of Artificial Sequence: Synthetic oligonucleotide
ttacatcaattatgatacagtgg

SEQ ID NO: 1719 - DNA, 23 bp, Artificial Sequence
  Description of Artificial Sequence: Synthetic oligonucleotide
tgacataaattattttacttagg

SEQ ID NO: 1720 - DNA, 23 bp, Artificial Sequence
  Description of Artificial Sequence: Synthetic oligonucleotide
aagaaaaaattattatacatagg

SEQ ID NO: 1721 - DNA, 23 bp, Artificial Sequence
  Description of Artificial Sequence: Synthetic oligonucleotide
gtttcagaattattatacatagg

SEQ ID NO: 1722 - DNA, 23 bp, Artificial Sequence
  Description of Artificial Sequence: Synthetic oligonucleotide
gagtccgagcagaagaagaaggg

SEQ ID NO: 1723 - DNA, 23 bp, Artificial Sequence
  Description of Artificial Sequence: Synthetic oligonucleotide
gagttagagcagaagaagaaagg

SEQ ID NO: 1724 - DNA, 23 bp, Artificial Sequence
  Description of Artificial Sequence: Synthetic oligonucleotide
aggtactagcagaagaagaaagg

SEQ ID NO: 1725 - DNA, 23 bp, Artificial Sequence
  Description of Artificial Sequence: Synthetic oligonucleotide
acgtctgagcagaagaagaatgg

SEQ ID NO: 1726 - DNA, 23 bp, Artificial Sequence
  Description of Artificial Sequence: Synthetic oligonucleotide
aggtgctagcagaagaagaaggg

SEQ ID NO: 1727 - DNA, 21 bp, Artificial Sequence
  Description of Artificial Sequence: Synthetic oligonucleotide
ggagtccgagcagaagaagaa

SEQ ID NO: 1728 - DNA, 20 bp, Artificial Sequence
  Description of Artificial Sequence: Synthetic oligonucleotide
gagtccgagcagaagaagaa

SEQ ID NO: 1729 - DNA, 20 bp, Artificial Sequence
  Description of Artificial Sequence: Synthetic oligonucleotide
aagtccgagcagaagaagaa

SEQ ID NO: 1730 - DNA, 20 bp, Artificial Sequence
  Description of Artificial Sequence: Synthetic oligonucleotide
tagtccgagcagaagaagaa

SEQ ID NO: 1731 - DNA, 20 bp, Artificial Sequence
  Description of Artificial Sequence: Synthetic oligonucleotide
cagtccgagcagaagaagaa

SEQ ID NO: 1732 - DNA, 21 bp, Artificial Sequence
  Description of Artificial Sequence: Synthetic oligonucleotide
ggggtggggggagtttgctcc

SEQ ID NO: 1733 - DNA, 20 bp, Artificial Sequence
  Description of Artificial Sequence: Synthetic oligonucleotide
gggtggggggagtttgctcc

SEQ ID NO: 1734 - DNA, 20 bp, Artificial Sequence
  Description of Artificial Sequence: Synthetic oligonucleotide
aggtggggggagtttgctcc

SEQ ID NO: 1735 - DNA, 20 bp, Artificial Sequence
  Description of Artificial Sequence: Synthetic oligonucleotide
tggtggggggagtttgctcc

SEQ ID NO: 1736 - DNA, 20 bp, Artificial Sequence
  Description of Artificial Sequence: Synthetic oligonucleotide
cggtggggggagtttgctcc

SEQ ID NO: 1737 - DNA, 76 bp, Artificial Sequence
  Description of Artificial Sequence: Synthetic oligonucleotide
  Description of Combined DNA/RNA Molecule: Synthetic oligonucleotide
guuuuagagcuagaaauagcaaguuaaaauaaggcuaguccguuaucaacuugaaaaagtggcaccgagucggugc

SEQ ID NO: 1738 - DNA, 66 bp, Artificial Sequence
  Description of Artificial Sequence: Synthetic oligonucleotide
  Description of Combined DNA/RNA Molecule: Synthetic oligonucleotide
guuuuagagcuagaaauagcaaguuaaaauaaggcuaguccguuaucaatggcaccgagucggugc

SEQ ID NO: 1739 - DNA, 67 bp, Artificial Sequence
  Description of Artificial Sequence: Synthetic oligonucleotide
  Description of Combined DNA/RNA Molecule: Synthetic oligonucleotide
guuuuagagcuagaaauagcaaguuaaaauaaggcuaguccguuaucaactggcaccgagucggugc

SEQ ID NO: 1740 - DNA, 68 bp, Artificial Sequence
  Description of Artificial Sequence: Synthetic oligonucleotide
  Description of Combined DNA/RNA Molecule: Synthetic oligonucleotide
guuuuagagcuagaaauagcaaguuaaaauaaggcuaguccguuaucaacutggcaccgagucggugc

SEQ ID NO: 1741 - RNA, 69 nt, Artificial Sequence
  Description of Artificial Sequence: Synthetic oligonucleotide
guuuuagagcuagaaauagcaaguuaaaauaaggcuaguccguuaucaacuugaaaaaguggcuuuuuu

SEQ ID NO: 1742 - RNA, 70 nt, Artificial Sequence
  Description of Artificial Sequence: Synthetic oligonucleotide
guuuuagagcuagaaauagcaaguuaaaauaaggcuaguccguuaucaacuugaaaaaguggucuuuuuu

SEQ ID NO: 1743 - RNA, 71 nt, Artificial Sequence
  Description of Artificial Sequence: Synthetic oligonucleotide
guuuuagagcuagaaauagcaaguuaaaauaaggcuaguccguuaucaacuugaaaaagugguccuuuuuu

SEQ ID NO: 1744 - DNA, 73 bp, Artificial Sequence
  Description of Artificial Sequence: Synthetic oligonucleotide
  Description of Combined DNA/RNA Molecule: Synthetic oligonucleotide
guuuuagagcuagaaauagcaaguuaaaauaaggcuaguccgucaacuugaaaaagtggcaccgagucggugc

SEQ ID NO: 1745 - DNA, 74 bp, Artificial Sequence
  Description of Artificial Sequence: Synthetic oligonucleotide
  Description of Combined DNA/RNA Molecule: Synthetic oligonucleotide
guuuuagagcuagaaauagcaaguuaaaauaaggcuaguccguacaacuugaaaaagtggcaccgagucggugc

SEQ ID NO: 1746 - DNA, 75 bp, Artificial Sequence
  Description of Artificial Sequence: Synthetic oligonucleotide
  Description of Combined DNA/RNA Molecule: Synthetic oligonucleotide
guuuuagagcuagaaauagcaaguuaaaauaaggcuaguccguaucaacuugaaaaagtggcaccgagucggugc

SEQ ID NO: 1747 - DNA, 77 bp, Artificial Sequence
  Description of Artificial Sequence: Synthetic oligonucleotide
  Description of Combined DNA/RNA Molecule: Synthetic oligonucleotide
guuuuagagcuagaaauagcaaguuaaaauaaggcuaguccguuaucgaacuugaaaaagtggcaccgagucggugc

SEQ ID NO: 1748 - DNA, 78 bp, Artificial Sequence
  Description of Artificial Sequence: Synthetic oligonucleotide
  Description of Combined DNA/RNA Molecule: Synthetic oligonucleotide
guuuuagagcuagaaauagcaaguuaaaauaaggcuaguccguuaucgcaacuugaaaaagtggcaccgagucggugc

SEQ ID NO: 1749 - DNA, 79 bp, Artificial Sequence
  Description of Artificial Sequence: Synthetic oligonucleotide
  Description of Combined DNA/RNA Molecule: Synthetic oligonucleotide
guuuuagagcuagaaauagcaaguuaaaauaaggcuaguccguuauctgcaacuugaaaaagtggcaccgagucggugc

SEQ ID NO: 1750 - DNA, 79 bp, Artificial Sequence
  Description of Artificial Sequence: Synthetic oligonucleotide
  Description of Combined DNA/RNA Molecule: Synthetic oligonucleotide
guuuuagagcuagaaauagcaaguuaaaauaaggcuagcaguccguuaucaacuugaaaaagtggcaccgagucggugc

SEQ ID NO: 1751 - DNA, 82 bp, Artificial Sequence
  Description of Artificial Sequence: Synthetic oligonucleotide
  Description of Combined DNA/RNA Molecule: Synthetic oligonucleotide
guuuuagagcuagaaauagcaaguuaaaauaaggcuaugacuaguccguuaucaacuugaaaaagtggcaccgagucggugc

SEQ ID NO: 1752 - DNA, 86 bp, Artificial Sequence
  Description of Artificial Sequence: Synthetic oligonucleotide
  Description of Combined DNA/RNA Molecule: Synthetic oligonucleotide
guuuuagagcuagaaauagcaaguuaaaauaaggcuacugaaacagaguccguuaucaacuugaaaaagtggcaccgagucggugc

SEQ ID NO: 1753 - DNA, 90 bp, Artificial Sequence
  Description of Artificial Sequence: Synthetic oligonucleotide
  Description of Combined DNA/RNA Molecule: Synthetic oligonucleotide
guuuuagagcuagaaauagcaaguuaaaauaaggcuaggauuucaauccaaguccguuaucaacuugaaaaagtggcaccgagucggugc

SEQ ID NO: 1754 - DNA, 24 bp, Artificial Sequence
  Description of Artificial Sequence: Synthetic oligonucleotide
  modified_base (22)..(22): a, c, t, g, unknown or other
ggggtggggggagtttgctccngg

SEQ ID NO: 1755 - DNA, 24 bp, Artificial Sequence
  Description of Artificial Sequence: Synthetic oligonucleotide
gggatggagggagtttgctcctgg

SEQ ID NO: 1756 - DNA, 24 bp, Artificial Sequence
  Description of Artificial Sequence: Synthetic oligonucleotide
cggggaggggaagtttgctcctgg

SEQ ID NO: 1757 - DNA, 24 bp, Artificial Sequence
  Description of Artificial Sequence: Synthetic oligonucleotide
agggagggtggagtttgctcctgg

SEQ ID NO: 1758 - DNA, 24 bp, Artificial Sequence
  Description of Artificial Sequence: Synthetic oligonucleotide
acgggggagggagtttgctcctgg
